(19) United States
(12) Patent Application Publication
(10) Pub. No.: US 2024/0287487 A1
(43) Pub. Date: Aug. 29, 2024

(54) IMPROVED CYTOSINE TO GUANINE BASE EDITORS

(71) Applicants: The Broad Institute, Inc., Cambridge, MA (US); President and Fellows of Harvard College, Cambridge, MA (US); The Regents of the University of California, Oakland, CA (US); Massachusetts Institute of Technology, Cambridge, MA (US)

(72) Inventors: Luke W. Koblan, Cambridge, MA (US); David R. Liu, Cambridge, MA (US); Mandana Arbab, Cambridge, MA (US); Max Walt Shen, Cambridge, MA (US); Andrew Vito Anzalone, Cambridge, MA (US); Jeffrey Hussmann, Oakland, CA (US)

(73) Assignees: The Broad Institute, Inc., Cambridge, MA (US); President and Fellows of Harvard College, Cambridge, MA (US); The Regents of the University of California, Oakland, CA (US); Massachusetts Institute of Technology, Cambridge, MA (US)

(21) Appl. No.: 18/568,796

(22) PCT Filed: Jun. 10, 2022
(86) PCT No.: PCT/US2022/033121

§ 371 Date: Dec. 8, 2023

Related U.S. Application Data
(60) Provisional application No. 63/209,881, filed on Jun. 11, 2021.

(51) Int. Cl. C12N 9/22; A61K 38/00; C07K 14/35; C12N 9/10; C12N 9/12; C12N 9/78; C12N 15/11; C12N 15/90

(52) U.S. Cl. CPC C12N 9/22; C07K 14/35; C12N 9/104; C12N 9/1252; C12N 9/78; C12N 15/11; C12N 15/907; C12Y 207/07007; C12Y 305/04005; A61K 38/00; C07K 2319/00; C12N 2310/20; C12N 2800/80

(57) ABSTRACT

Aspects of this disclosure provide compositions, strategies, systems, reagents, methods, and kits that are useful for the targeted editing of nucleic acids, including editing a single site within the genome of a cell or subject, e.g., within the human genome. Fusion proteins capable of inducing a cytosine (C) to guanine (G) change (i.e., transversion changes) in a nucleic acid (e.g., genomic DNA) are provided. Fusion proteins of a nucleic acid programmable DNA binding protein (e.g., Cas9) and nucleic acid editing proteins or protein domains, e.g., deaminase domains, polymerase domains, base excision enzymes, and/or DNA repair proteins, are also provided. Methods for targeted nucleic acid editing are also provided. Reagents and kits for the generation of targeted nucleic acid editing proteins, e.g., fusion proteins of a nucleic acid programmable DNA binding protein (e.g., Cas9), and nucleic acid editing proteins or domains, are further provided in the present disclosure.

### RELATED APPLICATIONS

[0001] This application claims priority under 35 U.S.C. § 119(e) to U.S. Provisional Application, U.S. Ser. No. 63/209,881, filed Jun. 11, 2021, which is incorporated herein by reference.

### BACKGROUND OF INVENTION

[0002] Targeted editing of nucleic acid sequences, for example, the targeted cleavage or the targeted introduction of a specific modification into genomic DNA, is a highly promising approach for the study of gene function and also has the potential to provide new therapies for human genetic diseases. Since many genetic diseases in principle can be treated by effecting a specific nucleotide change at a specific location in the genome (for example, a C to G or a G to C change in a specific codon of a gene associated with a disease), the development of a programmable way to achieve such precise gene editing represents both a powerful new research tool, as well as a potential new approach to gene editing-based therapeutics.

[0003] Two primary classes of base editors have been generally described to date: cytosine base editors convert target C:G base pairs to T:A base pairs, and adenosine base editors convert A:T base pairs to G:C base pairs. Collectively, these two classes of base editors enable the targeted installation of all possible transition mutations (C-to-T, G-to-A, A-to-G, T-to-C, C-to-U, and A-to-U), which collectively account for about 61% of known human pathogenic single nucleotide polymorphisms (SNPs) in the ClinVar database. See Gaudelli, N. M. et al., Programmable base editing of A:T to G:C in genomic DNA without DNA cleavage. Nature 551, 464-471 (2017), which is incorporated herein by reference.

[0004] For instance, C-to-T base editors use a cytidine deaminase to convert cytidine to uracil in the single-stranded DNA loop created by the Cas9 (“CRISPR-associated protein 9”) domain. The opposite strand is nicked by Cas9 to stimulate DNA repair mechanisms that use the edited strand as a template, while a fused uracil glycosylase inhibitor slows excision of the edited base. Eventually, DNA repair leads to a C:G to T:A base pair conversion. This class of base editor is described in U.S. Patent Publication No. 2017/0121693, published May 4, 2017, which issued on Jan. 1, 2019, as U.S. Pat. No. 10,167,457, which is incorporated herein by reference. Cytosine and adenosine base editors are not capable, however, of generating transversion mutations. Accordingly, there is a need for transversion base editors.

### SUMMARY OF THE INVENTION

[0005] A major limitation of base editing is the inability to generate transversion (purine↔pyrimidine) changes, which are needed to correct the remaining ˜38% of known human pathogenic SNPs. See Komor, A. C. et al., Programmable editing of a target base in genomic DNA without double-stranded DNA cleavage, Nature 533, 420-424 (2016); and Landrum, M. J. et al., ClinVar: public archive of relationships among sequence variation and human phenotype, Nucleic Acids Res. 42, D980-985 (2014), each of which is incorporated herein by reference. Traditionally, transversions could only be repaired by nuclease-mediated formation of a double-stranded break (DSB) followed by homology directed repair (HDR), which is typically inefficient, especially in non-mitotic cells, and leads to undesired byproducts such as indels (insertions and deletions) and translocations. See Komor, A. C., Badran, A. H. & Liu, D. R. CRISPR-Based Technologies for the Manipulation of Eukaryotic Genomes, Cell 168, 20-36, (2017), herein incorporated by reference. Since nucleobase deamination alone cannot interconvert purines and pyrimidines, the development of transversion base editors has required the incorporation of novel editing strategies, such as the manipulation of endogenous DNA repair pathways or a different nucleobase chemical transformation. See for instance, International Publication Nos. WO 2018/165629, which published on Sep. 13, 2018, WO 2020/102659, which published on May 22, 2020, WO 2020/181178, which published on Sep. 10, 2020, WO 2020/181180, which published on Sep. 10, 2020, WO 2020/181195, which published on Sep. 10, 2020, and WO 2021/030666, which published on Feb. 18, 2021, each of which are incorporated herein in their entireties.

[0006] The disclosure provides CGBEs that exhibit higher editing yields, higher product purities, and/or lower bystander editing efficiencies than previously described CGBEs, such as those described in International Publication No. WO 2018/165629, published Sep. 13, 2018; Kurt, I. C. et al. Nature Biotechnology 39, 41-46 (2020); Zhao, D. et al. Nature Biotechnology 39, 35-40 (2020); and Chen, L. et al., Nature Communications 12 (2021), each of which is incorporated by reference herein. The presently disclosed CGBEs may contain multiple uracil binding protein (UBP) domains, whereas the previously described CGBEs contain a single uracil binding protein domain. Use of multiple UBPs, and in particular UBPs that bind tightly to uracil with minimal uracil excising activity, may increase the occurrence of C to G editing following formation of an abasic site.

[0007] In other aspects, the disclosed CGBEs may contain one or more domains containing a protein implicated in DNA repair (referred to herein as “DNA repair protein domains”) that are not present in previously described CGBEs. In other aspects, the disclosed CGBEs may contain a nucleic acid programmable DNA binding protein (napDNAbp) domain containing a Cas9 variant different from the Cas9 protein domains used in previously described CGBEs, including recently generated Cas9 variants that have expanded targeting scope or higher DNA base specificities. In some embodiments, the disclosed CGBEs contain a DNA repair protein domain and a napDNAbp domain containing a Cas9 variant. In some embodiments, these CGBEs contain a single UBP domain. In some embodiments, these CGBEs contain two or more UBP domains, such as a first UBP domain and a second UBP domain.

[0008] The disclosed CGBEs may exhibit broader sequence substrate scope, thus enabling efficient editing at a greater number of genomic loci, than previously described CGBEs. At several genomic loci, the disclosed CGBEs may outperform previously described CGBEs.

[0009] Accordingly, provided herein are improved base editors, vectors encoding these base editors, complexes of these base editors and a guide RNA, cells and compositions comprising these base editors, and methods of modifying a polynucleotide (e.g., DNA) for generating a cytosine to guanine substitution in the polynucleotide. As described in greater detail herein, base editing (e.g., C to G editing) is accomplished by deaminating a cytosine (C) nucleobase leading to excision of the resulting uracil, thereby generating an abasic site within a nucleic acid sequence. The nucleobase opposite the abasic site (e.g., guanine), is then replaced with a different nucleobase (e.g., cytosine), for example, by an endogenous translesion polymerase. Base editing fusion proteins described herein are capable of generating specific mutations (C to G mutations), within a nucleic acid (e.g., genomic DNA), which can be used, for example, to treat diseases involving nucleic acid mutations, e.g., C to G, or G to C mutations.

[0010] As disclosed in International Publication No. WO 2018/165629, published Sep. 13, 2018, which is incorporated herein by reference, an example of a C to G base editor includes a fusion protein containing a nucleic acid programmable DNA binding protein domain (e.g., a Cas9 domain), a uracil binding protein (UBP) domain, and a cytidine deaminase domain. This publication disclosed fusion proteins containing a single uracil binding protein domain, such as a single UdgX domain, an orthologue of Uracil N-glycosylase (UNG) identified to bind tightly to uracil. The UdgX domain has been shown to increase the amount of C to G editing. Without wishing to be bound by any particular theory, such base editing fusion proteins are capable of binding to a specific nucleic acid sequence (e.g., via the Cas9 domain), deaminating a cytosine within the nucleic acid sequence to a uracil, which is then excised from the nucleic acid molecule by the UDG domain. The nucleobase opposite the abasic site can then be replaced with another base (e.g., cytosine), for example, by an endogenous translesion polymerase. More often than 25% of the time, the cell's base repair machinery replaces a nucleobase opposite an abasic site with a cytosine.

[0011] Cytosine-to-guanine base editing fusion proteins include a nucleic acid programmable DNA binding protein (e.g., a Cas9 domain), and a base excision enzyme that removes a nucleobase (e.g., a cytosine). Rather than deaminating a cytosine to uracil and excising the uracil using a UDG, as described above, a base editor may include a base excision enzyme that recognizes and removes a nucleobase such as a cytosine or a thymine without first deaminating it. Accordingly, base editors (e.g., C to G base editors) have been engineered by fusing a nucleic acid programmable DNA binding protein (e.g., a Cas9 domain) to a base excision enzyme that removes cytosine or thymine from a nucleic acid molecule. Furthermore, as with the base editor described above, translesion polymerases may be incorporated into this base editor to increase the cytosine incorporation opposite an abasic site generated by the base excision enzyme of the base editor. Exemplary base editing proteins and schematic representations outlining cytosine-to-guanine base editing strategies can be seen, for example, in FIGS. 1-6, 33-36, 40, 48, and 52.

[0012] The improved CGBEs provided herein make use of fusion proteins that include additional domains not included in previously disclosed CGBEs. These domains may include multiple uracil binding proteins, such as multiple uracil DNA glycosylase proteins (e.g., multiple UdgX protein domains), proteins implicated in DNA repair, and/or Cas9 variants not included in previously disclosed CGBEs, including Cas9 variants having higher DNA base specificities.

[0013] Accordingly, in some embodiments, the disclosure provides fusion proteins that are capable of cytosine to guanine base editing. The presently disclosed CGBEs contain one or more UBP domains. In various embodiments, the UBP domain is a a UNG orthologue from Mycobacterium smegmatis (or B. smegmatis or M. smegmatis) (UdgX) protein. The inventors have demonstrated that efficient CGBE editing is achieved when, for instance, the fusion protein contains an architecture comprising NH₂-[cytidine deaminase domain]-[first UBP domain]-[napDNAbp domain]-COOH, wherein each instance of “]-[” comprises an optional linker. For instance, efficient CGBE editing is achieved when the fusion protein contains a structure that comprises NH₂-[APOBEC1 deaminase domain]-[UdgX domain]-[Cas9 domain]-COOH, which is an architecture referred to herein as the “AXC” architecture.

[0014] Thus, in some aspects, a CGBE fusion protein may comprise (i) a napDNAbp domain, (ii) a cytidine deaminase domain, (iii) a first UBP domain, and (iv) a second UBP domain. These fusion proteins may further comprise a third UBP domain. In various embodiments, at least one of the first, second, and third UBP domains is a a UNG orthologue from Mycobacterium smegmatis (UdgX) protein. In some embodiments, each of the first and second, and/or third, UBP domain is a UdgX protein.

[0015] The disclosure is based, at least in part, on a focused CRISPR interference (CRISPRi) screen to identify DNA repair genes that impact cytosine base editing efficiency and purity. Guided by these data, various fusions proteins were constructed containing deaminases and Cas proteins fused to DNA repair proteins to generate novel CGBEs. These DNA repair proteins include DNA polymerase D2 (POLD2), exonuclease 1 (EXO1), and RNA binding motif protein X-linked (RBMX). In some aspects, the improved CGBEs contain a DNA repair protein domain. Accordingly, in some aspects, the fusion protein includes (i) a napDNAbp domain, (ii) a cytidine deaminase domain, (iii) a first UBP domain, and (iv) a DNA repair protein. Without being bound to a particular theory, the protein of this domain may be implicated in DNA repair in the traditional sense. In other embodiments, the protein of this domain is implicated in DNA repair by virtue of the results of a CRISPRi screen to identify DNA repair genes that impact cytosine base editing efficiency and purity.

[0016] Accordingly, in some embodiments, the DNA repair protein is selected from a DNA polymerase, an exonuclease, an RNA binding motif protein, an E3 ligase, and a translesion polymerase. In particular embodiments, the DNA repair protein is one of POLD2, RBMX, and EXO1. In some embodiments, the DNA repair protein is a nucleic acid polymerase, such as a DNA polymerase (e.g., a translesion polymerase). In various embodiments, the DNA repair protein is selected from DNA polymerase D1 (POLD1), DNA polymerase D2 (POLD2), and DNA polymerase D3 (POLD3).

[0017] In some aspects, the CGBEs of the disclosure include a napDNAbp domain that is a Cas9 variant having a higher targeting specificity than the napDNAbp domains of previously disclosed CGBEs. In some embodiments, the napDNAbp domain is selected from a HypaCas9, an HF-nCas9-NG, a Sniper-Cas9, a Hypa-nCas9, an HF-Hypa-nCas9, an e-Cas9, an e-HF-Hypa-nCas9, and an e-Hypa-Cas9, or the napDNAbp is at least 80%, at least 85%, at least 90%, at least 95%, at least 96%, at least 97%, at least 98%, or at least 99% identical to the amino acid sequence of any one of HypaCas9, an HF-nCas9-NG, a Sniper-Cas9, a Hypa-nCas9, an HF-Hypa-nCas9, an e-Cas9, an e-HF-Hypa-nCas9, and an e-Hypa-Cas9. In some aspects, the napDNAbp domain is selected from an HF-nCas9-NG, an HF-Hypa-nCas9, and an e-HF-Hypa-nCas9. In some embodiments, the CGBEs of the disclosure may comprise: (i) a napDNAbp domain, (ii) a cytidine deaminase domain, (iii) a first uracil binding protein (UBP) domain, and (iv) a DNA repair protein; or (i) a napDNAbp domain, (ii) a cytidine deaminase domain, (iii) a first UBP domain, and (iv) a second UBP domain, wherein the napDNAbp domain is selected from a HypaCas9, a HF-nCas9-NG, a Sniper-Cas9, an HF-Hypa-nCas9, an e-Cas9, an e-HF-Hypa-nCas9, and an e-Hypa-Cas9. In some embodiments, the napDNAbp domain of any of the disclosed CGBEs comprises an amino acid sequence that is at least 85%, 90%, 92.5%, 95%, 97%, 98%, or 99% identical to any of the sequences set forth as SEQ ID NOs: 726-736. In some embodiments, the napDNAbp domain of any of the disclosed CGBEs is selected from SEQ ID NOs: 726-736.

[0018] In other aspects, it was found that incorporating into the base editor a nucleic acid polymerase (NAP) domain, such as a translesion polymerase, in place of or in addition to the DNA repair protein domain, can increase the percentage of cytosine incorporation opposite an abasic site. Accordingly, base editors were engineered to incorporate various translesion polymerase domains to improve base editing efficiency. Translesion polymerases that increase the preference for C integration opposite an abasic site can improve the efficiency of C to G nucleobase editing.

[0019] The present disclosure further provides complexes comprising the cytosine-to-guanine base editors described herein and a guide RNA associated with the napDNAbp domain of the base editor, such as a single guide RNA. The guide RNA may be 15-100 nucleotides in length, and/or the guide RNA comprise a sequence of at least 10, at least 15, or at least 20 contiguous nucleotides that is complementary to a target nucleotide sequence.

[0020] The present disclosure further provides methods of DNA editing that make use of the base editors disclosed herein. These methods may induce (or yield, provide, or cause) an actual or average efficiency of conversion of C to G of at least about 70%, 73%, 75%, 77%, 80%, 82%, 83%, 84%, 86%, 88%, 90%, 92.5%, 95%, or 98% when contacted with a DNA molecule comprising a target sequence.

[0021] In other aspects, the disclosure provides polynucleotides and vectors encoding any of the base editors described herein. In some embodiments, the polynucleotides and vectors encode a gRNA. The nucleic acid sequences may be codon-optimized for expression in the cells of any organism of interest (e.g., a human).

[0022] In other aspects, the disclosure provides kits for expressing and/or transducing host cells with an expression construct encoding the base editor and gRNA. It further provides kits for administration of expressed base editors and expressed gRNA molecules to a host cell (such as a mammalian cell, e.g., a human cell). The disclosure further provides cells stably or transiently expressing the base editor and gRNA, or a complex thereof.

[0023] It should be appreciated that any of the base editors described herein may be introduced into the cell in any suitable way, either stably or transiently. In some embodiments, a base editor may be transfected into the cell. In some embodiments, the cell may be transduced or transfected with a nucleic acid construct that encodes a base editor. For example, a cell may be transduced (e.g., with a viral particle containing a vector encoding a base editor) with a nucleic acid that encodes a base editor, or the translated base editor. As an additional example, a cell may be transfected (e.g., with a plasmid encoding a base editor) with a nucleic acid that encodes a base editor or the translated base editor.

[0024] In some embodiments, methods of treatment using the base editors described herein are provided. The methods described herein may comprise treating a subject having or at risk of developing a disease, disorder, or condition associated with a G:C to C:G point mutation comprising administering to the subject an base editor as described herein, a polynucleotide as described herein, a vector as described herein, or a pharmaceutical composition as described herein. In some embodiments, methods of treatment of Ehlers-Danlos syndrome, Sotos syndrome, Cornelia de Lange syndrome, or a cancer using the base editors described herein are provided. In some embodiments, the present disclosure provides uses of any of the fusion proteins, complexes, vectors, cells, and pharmaceutical compositions provided herein as a medicament.

[0025] Base editors and methods of using base editors are described below in further detail.

[0026] It should be appreciated that the foregoing concepts, and additional concepts discussed below, may be arranged in any suitable combination, as the present disclosure is not limited in this respect. Further, other advantages and novel features of the present disclosure will become apparent from the following detailed description of various non-limiting embodiments when considered in conjunction with the accompanying figures.

### BRIEF DESCRIPTION OF THE DRAWINGS

[0027] FIG. 1 shows a general schematic illustrating C to T and C to G base editing. Certain DNA polymerases (e.g., translesion polymerases) are known to replace bases opposite abasic sites with G. One strategy to achieve C to G base editing is to induce the creation of an abasic site, then recruit or tether such a polymerase to replace the G opposite the abasic site with a C.

[0028] FIG. 2 shows a general schematic illustrating base editing via abasic site generation and base-specific repair for C to G editing.

[0029] FIG. 3 shows a schematic illustrating Scheme 1 from FIG. 1, where an abasic site is formed, for C to G base editing. If the abasic is generated efficiently, this can increase the total flux through the C to G editing pathway.

[0030] FIG. 4 shows a schematic illustrating approach 1 for C to G base editing where an increase in abasic site formation is used. If the abasic is generated efficiently, for example, by using a UDG domain and a translesion polymerase, this can increase the total flux through the C to G editing pathway.

[0031] FIG. 5 shows a schematic illustrating the effect of UdgX on base editing. UdgX, an orthologue of UDG. In 1) UdgX* is a variant of UDG which was determined to lack uracil binding activity via an in vitro assay. In 2) UdgX_On is a variant which was shown to increase uracil excision through an in vitro assay. In 3) UDG direct fusion excises uracil.

[0032] FIG. 6 shows a schematic (on the left) illustrating an exemplary C to T base editor (e.g., BE3), which contains a uracil glycosylase inhibitor (UGI), a Cas9 domain (e.g., nCas9), and a cytidine deaminase. On the right is a schematic illustrating a C to G base editor, which contains a uracil DNA glycosylase (UDG) (or variants thereof), a Cas9 domain (e.g., nCas9), and a cytidine deaminase.

[0033] FIG. 7 shows total editing percentages at the HEK2 site in WT Hap1 cells using seven base editors (BE3; BE3_UdgX; BE3_UdgX*; BE2_UdgX_On; BE3_UdgX_On; BE2_UDG; and BE3_UDG). Raw editing values are shown in the left panel. The panel on the right shows a graphical representation of the raw editing values, where C to G base editing is graphically shown by dotted bars (G) going to filled bars (C), as sequencing was performed on the DNA strand opposite of the strand containing the edited C.

[0034] FIG. 8 shows total editing percentages at the HEK2 site with additional C to G base editors (BE3; BE3_UdgX; BE3_REV7; and SMUG1, where BE3 and BE3_UdgX are repeated from FIG. 4) in WT Hap1 cells. The top panel shows the raw editing values. The bottom panel shows a graphical representation of the raw editing values, where C to G base editing is graphically shown by dotted bars (G) going to filled bars (C), as sequencing was performed on the DNA strand opposite of the strand containing the edited C.

[0035] FIG. 9 shows the editing specificity ratio at the HEK2 site with various C to G base editors (BE3; BE3_UdgX; BE3_UdgX*; BE3_REV7; BE2_UDG; BE3_UDG BE2_UdgX_On; BE3_UdgX_On; and SMUG1) in WT Hap1 cells. The top panel shows the total percentage of edits and the ratio of edits that have been made from G to A, C, or T. The bottom panel is a graphical representation of the specificity ratio values.

[0036] FIG. 10 shows total editing percentages at the RNF2 site in WT Hap1 cells using seven base editors (BE3; BE3_UdgX; BE3_UdgX*; BE2_UdgX_On; BE3_UdgX_On; BE2_UDG; and BE3_UDG). Raw editing values are shown in the left panel. The panel on the right shows a graphical representation of the raw editing values, where C to G base editing is graphically shown by dotted bars (G) going to filled bars (C), as sequencing was performed on the DNA strand opposite of the strand containing the edited C.

[0037] FIG. 11 shows total editing percentages at the RNF2 site with additional C to G base editors (BE3; BE3_UdgX; BE3_REV7; and SMUG1, where BE3 and BE3_UdgX are repeated from FIG. 7) in WT Hap1 cells. The top panel shows the raw editing values. The bottom panel shows a graphical representation of the raw editing values, where C to G base editing is graphically shown by dotted bars (G) going to filled bars (C), as sequencing was performed on the DNA strand opposite of the strand containing the edited C.

[0038] FIG. 12 shows editing specificity ratio at the RNF2 site with various C to G base editors (BE3; BE3_UdgX; BE3_UdgX*; BE3_REV7; BE2_UDG; BE3_UDG BE2_UdgX_On; BE3_UdgX_On; and SMUG1) in WT Hap1 cells. The top panel shows the total percentage of edits and the ratio of edits that have been made from G to A, C, or T. The bottom panel is a graphical representation of the specificity ratio values.

[0039] FIG. 13 shows total editing percentages at the FANCF site in WT Hap1 cells using seven base editors (BE3; BE3_UdgX; BE3_UdgX*; BE2_UdgX_On; BE3_UdgX_On; BE2_UDG; and BE3_UDG). Raw editing values are shown in the left panel. The panel on the right shows a graphical representation of the raw editing values, where C to G base editing is graphically shown by filled bars (C) going to dotted bars (G).

[0040] FIG. 14 shows total editing percentages at the FANCF site with additional C to G base editors (BE3; BE3_UdgX; BE3_REV7; and SMUG1, where BE3 and BE3_UdgX are repeated from FIG. 10) in WT Hap1 cells. The top panel shows the raw editing values. The bottom panel shows a graphical representation of the raw editing values, where C to G base editing is graphically shown by filled bars (C) going to dotted bars (G).

[0041] FIG. 15 shows the editing specificity ratio at the FANCF site with various C to G base editors (BE3; BE3_UdgX; BE3_UdgX*; BE3_REV7; BE2_UDG; BE3_UDG BE2_UdgX_On; BE3_UdgX_On; and SMUG1) in WT Hap1 cells. The top panel shows the total percentage of edits and the ratio of edits that have been made from C to A, G, or T. The bottom panel is a graphical representation of the specificity ratio values.

[0042] FIG. 16 shows total editing percentages at the HEK2 site in UDG^{-/-} Hap1 cells using seven base editors (BE3; BE3_UdgX; BE3_UdgX*; BE2_UdgX_On; BE3_UdgX_On; BE2_UDG; and BE3_UDG). Raw editing values are shown in the left panel. The panel on the right shows a graphical representation of the raw editing values, where C to G base editing is graphically shown by dotted bars (G) going to filled bars (C), as sequencing was performed on the DNA strand opposite of the strand containing the edited C.

[0043] FIG. 17 shows total editing percentages at the HEK2 site with additional C to G base editors (BE3; BE3_UdgX; BE3_REV7; and SMUG1, where BE3 and BE3_UdgX are repeated from FIG. 13) in UDG^{-/-} Hap1 cells. The top panel shows the raw editing values. The bottom panel shows a graphical representation of the raw editing values, where C to G base editing is graphically shown by dotted bars (G) going to filled bars (C), as sequencing was performed on the DNA strand opposite of the strand containing the edited C.

[0044] FIG. 18 shows editing specificity ratio at the HEK2 site with various C to G base editors (BE3; BE3_UdgX; BE3_UdgX*; BE3_REV7; BE2_UDG; BE3_UDG BE2_UdgX_On; BE3_UdgX_On; and SMUG1) in UDG^{-/-} Hap1 cells. The top panel shows the total percentage of edits and the ratio of edits that have been made from G to A, C, or T. The bottom panel is a graphical representation of the specificity ratio values.

[0045] FIG. 19 shows total editing percentages at the RNF2 site in UDG^{-/-} Hap1 cells using seven base editors (BE3; BE3_UdgX; BE3_UdgX*; BE2_UdgX_On; BE3_UdgX_On; BE2_UDG; and BE3_UDG). Raw editing values are shown in the left panel. The panel on the right shows a graphical representation of the raw editing values, where C to G base editing is graphically shown by dotted bars (G) going to filled bars (C), as sequencing was performed on the DNA strand opposite of the strand containing the edited C.

[0046] FIG. 20 shows total editing percentages at the RNF2 site with additional C to G base editors (BE3; BE3_UdgX; BE3_REV7; and SMUG1, where BE3 and BE3_UdgX are repeated from FIG. 16) in UDG^{-/-} Hap1 cells. The top panel shows the raw editing values. The bottom panel shows a graphical representation of the raw editing values, where C to G base editing is graphically shown by dotted bars (G) going to filled bars (C), as sequencing was performed on the DNA strand opposite of the strand containing the edited C.

[0047] FIG. 21 shows the editing specificity ratio at the RNF2 site with various C to G base editors (BE3; BE3_UdgX; BE3_UdgX*; BE3_REV7; BE2_UDG; BE3_UDG BE2_UdgX_On; BE3_UdgX_On; and SMUG1) in UDG^{-/-} Hap1 cells. The top panel shows the total percentage of edits and the ratio of edits that have been made from G to A, C, or T. The bottom panel is a graphical representation of the specificity ratio values.

[0048] FIG. 22 shows total editing percentages at the FANCF site in UDG^{-/-} Hap1 cells using seven base editors (BE3; BE3_UdgX; BE3_UdgX*; BE2_UdgX_On; BE3_UdgX_On; BE2_UDG; and BE3_UDG). Raw editing values are shown in the left panel. The panel on the right shows a graphical representation of the raw editing values, where C to G base editing is graphically shown by filled bars (C) going to dotted bars (G).

[0049] FIG. 23 shows total editing percentages at the FANCF site with additional C to G base editors (BE3; BE3_UdgX; BE3_REV7; and SMUG1, where BE3 and BE3_UdgX are repeated from FIG. 19) in UDG^{-/-} Hap1 cells. The top panel shows the raw editing values. The bottom panel shows a graphical representation of the raw editing values, where C to G base editing is graphically shown by filled bars (C) going to dotted bars (G).

[0050] FIG. 24 shows the editing specificity ratio at the FANCF site with various C to G base editors (BE3; BE3_UdgX; BE3_UdgX*; BE3_REV7; BE2_UDG; BE3_UDG BE2_UdgX_On; BE3_UdgX_On; and SMUG1) in UDG^{-/-} Hap1 cells. The top panel shows the total percentage of edits and the ratio of edits that have been made from C to A, G, or T. The bottom panel is a graphical representation of the specificity ratio values.

[0051] FIG. 25 shows total editing percentages at the HEK2 site with various C to G base editors (BE3; BE3_UdgX; BE2_UNG; BE3_UNG; BE2UdgX_On; BE3UdgX_On; and SMUG1) in REV1^{-/-} Hap1 cells. The top panel shows the raw editing values. The bottom panel shows a graphical representation of the raw editing values, where C to G base editing is graphically shown by dotted bars (G) going to filled bars (C), as sequencing was performed on the DNA strand opposite of the strand containing the edited C.

[0052] FIG. 26 shows editing specificity ratio at the HEK2 site with various C to G base editors (BE3; BE3_UdgX; BE2_UNG; BE3_UNG; BE2UdgX_On; BE3UdgX_On; and SMUG1) in REV1^{-/-} Hap1 cells. The top panel shows the total percentage of edits and the ratio of edits that have been made from G to A, C, or T. The bottom panel is a graphical representation of the specificity ratio values.

[0053] FIG. 27 shows total editing percentages at the RNF2 site with various C to G base editors (BE3; BE3_UdgX; BE2_UNG; BE3_UNG; BE2UdgX_On; BE3UdgX_On; and SMUG1) in REV1^{-/-} Hap1 cells. The top panel shows the raw editing values. The bottom panel shows a graphical representation of the raw editing values, where C to G base editing is graphically shown by dotted bars (G) going to filled bars (C), as sequencing was performed on the DNA strand opposite of the strand containing the edited C.

[0054] FIG. 28 shows editing specificity ratio at the RNF2 site with various C to G base editors (BE3; BE3_UdgX; BE2_UNG; BE3_UNG; BE2UdgX_On; BE3UdgX_On; and SMUG1) in REV1^{-/-} Hap1 cells. The top panel shows the total percentage of edits and the ratio of edits that have been made from G to A, C, or T. The bottom panel is a graphical representation of the specificity ratio values.

[0055] FIG. 29 shows total editing percentages at the FANCF site with various C to G base editors (BE3; BE3_UdgX; BE2_UNG; BE3_UNG; BE2UdgX_On; BE3UdgX_On; and SMUG1) in REV1^{-/-} Hap1 cells. The top panel shows the raw editing values. The bottom panel shows a graphical representation of the raw editing values, where C to G base editing is graphically shown by filled bars (C) going to dotted bars (G).

[0056] FIG. 30 shows editing specificity ratio at the FANCF site with various C to G base editors (BE3; BE3_UdgX; BE2_UNG; BE3_UNG; BE2UdgX_On; BE3UdgX_On; and SMUG1) in REV1^{-/-} Hap1 cells. The top panel shows the total percentage of edits and the ratio of edits that have been made from C to A, G, or T. The bottom panel is a graphical representation of the specificity ratio values.

[0057] FIG. 31 shows a graphical representation of the raw editing values for the percent of total editing at the HEK2, RNF2, and FANCF sites using the indicated C to G base editors.

[0058] FIG. 32 shows a graphical representation of the specificity ratio for the percent of total editing at the HEK2, RNF2, and FANCF sites.

[0059] FIG. 33 shows a schematic illustrating an approach to increase in the incorporation of C opposite an abasic site, for C to G base editing. If the preference for C integration opposite an abasic site is increased, for example by using a polymerase (e.g., a translesion polymerase), the total C to G base editing will also be increased.

[0060] FIG. 34 shows a schematic illustrating an approach to increase in the incorporation of C opposite an abasic site, for C to G base editing. If the preference for C integration opposite an abasic site is increased, for example by incorporating a translesion polymerase into the base editor, the total C to G base editing may also be increased.

[0061] FIG. 35 shows a schematic illustrating the different polymerases that can be used in the C to G base editing approach of FIGS. 33 and 34.

[0062] FIG. 36 shows a schematic (on the left) illustrating an exemplary C to T base editor (e.g., BE3), which contains a uracil glycosylase inhibitor (UGI), a Cas9 domain (e.g., nCas9), and a cytidine deaminase. On the right is a schematic illustrating a C to G base editor, which contains a translesion polymerase, a Cas9 domain (e.g., nCas9), and a cytidine deaminase.

[0063] FIG. 37 shows base editing at the HEK2 site in WT cells using base editors tethered to REV1, Pol Kappa, Pol Eta, and Pol Iota. C to G editing is graphically shown by dotted bars (G) going to filled bars (C) in the graphical representation on the right panel. Pol Kappa tethering dramatically increases the efficiency of C to G editing. Raw editing values are shown on the left panel.

[0064] FIG. 38 shows base editing at the RNF2 site in WT cells using base editors tethered to REV1, Pol Kappa, Pol Eta, and Pol Iota. C to G editing is graphically shown by dotted bars (G) going to filled bars (C) in the graphical representation on the right panel. Pol Kappa tethering dramatically increases the efficiency of C to G editing. Raw editing values are shown on the left panel.

[0065] FIG. 39 shows base editing at the FANCF site in WT cells using base editors tethered to REV1, Pol Kappa, Pol Eta, and Pol Iota. C to G editing is graphically shown by filled bars (C) going to dotted bars (G) in the graphical representation on the right panel. Pol Kappa tethering dramatically increases the efficiency of C to G editing. Raw editing values are shown on the left panel.

[0066] FIG. 40 shows a schematic (on the left) illustrating an exemplary C to G base editor, which contains a uracil DNA glycosylase (UDG), a translesion polymerase, a Cas9 domain (e.g., nCas9), and a cytidine deaminase. On the right is a schematic illustrating a C to G base editor, which contains a translesion polymerase, a Cas9 domain (e.g., nCas9), and a base excision enzyme (e.g., a UDG variant capable of excising a C or T residue).

[0067] FIG. 41 shows C to G base editing using the base editor illustrated in the left panel of FIG. 40 (base editor containing a uracil DNA glycosylase (UDG), a translesion polymerase, a Cas9 domain, and a cytidine deaminase) at HEK2, RNF2, and FANCF sites using either Pol Kappa or Pol Iota tethered constructs. C to G editing is graphically shown by dotted bars (G) going to filled bars (C) for HEK2 and RNF2, and filled bars (C) going to dotted bars (G) for FANCF.

[0068] FIG. 42 shows base editing at the HEK2 site in WT cells using base editors tethered to either Pol Kappa, Pol Eta, Pol Iota, and REV1, which are shown in the right panel of FIG. 40 (base editor containing a translesion polymerase, a Cas9 domain, and base excision enzyme (UDG 147) which excises T). The amount C to G is graphically illustrated at specific residues in the HEK2 site. UDG 147 is a UDG variant that directly removes T.

[0069] FIG. 43 shows base editing at the RNF2 site in WT cells using base editors tethered to either Pol Kappa, Pol Eta, Pol Iota, and REV1, which are shown in the right panel of FIG. 40 (base editor containing a translesion polymerase, a Cas9 domain, and base excision enzyme (UDG 147) which excises T). The amount C to G is graphically illustrated at specific residues in the HEK2 site. UDG 147 is a UDG variant that directly removes T.

[0070] FIG. 44 shows base editing at the FANCF site in WT cells using base editors tethered to either Pol Kappa, Pol Eta, Pol Iota, and REV1, which are shown in the right panel of FIG. 40 (base editor containing a translesion polymerase, a Cas9 domain, and base excision enzyme (UDG 147) which excises T). The amount C to G is graphically illustrated at specific residues in the HEK2 site. UDG 147 is a UDG variant that directly removes T.

[0071] FIG. 45 shows base editing at the HEK2 site in WT cells using base editors tethered to either Pol Kappa, Pol Eta, Pol Iota, and REV1, which are shown in the right panel of FIG. 40 (base editor containing a translesion polymerase, a Cas9 domain, and base excision enzyme (UDG 204) which excises C). The amount C to G is graphically illustrated at specific residues in the HEK2 site. UDG 204 is a UDG variant that directly removes C.

[0072] FIG. 46 shows base editing at the RNF2 site in WT cells using base editors tethered to either Pol Kappa, Pol Eta, Pol Iota, and REV1, which are shown in the right panel of FIG. 40 (base editor containing a translesion polymerase, a Cas9 domain, and base excision enzyme (UDG 204) which excises C). The amount C to G is graphically illustrated at specific residues in the HEK2 site. UDG 204 is a UDG variant that directly removes C.

[0073] FIG. 47 shows base editing at the FANCF site in WT cells using base editors tethered to either Pol Kappa, Pol Eta, Pol Iota, and REV1, which are shown in the right panel of FIG. 40 (base editor containing a translesion polymerase, a Cas9 domain, and base excision enzyme (UDG 204) which excises C). The amount C to G is graphically illustrated at specific residues in the HEK2 site. UDG 204 is a UDG variant that directly removes C.

[0074] FIG. 48 shows a schematic illustrating a role of MSH2 in base repair, where MSH2 may facilitate the conversion of a uracil (U) to a cytosine (C) in DNA.

[0075] FIG. 49 shows base editing at the HEK2 site in MSH2−/− cells using six base editors (BE3; BE3_UdgX; BE3_UdgX*; BE2_UdgX_On; BE3_UdgX_On; and BE3_UDG). Raw editing values are shown in the left panel. The panel on the right shows a graphical representation of the raw editing values, where C to G base editing is graphically shown by dotted bars (G) going to filled bars (C).

[0076] FIG. 50 shows base editing at the RNF2 site in MSH2−/− cells using six base editors (BE3; BE3_UdgX; BE3_UdgX*; BE2_UdgX_On; BE3_UdgX_On; and BE3_UDG). Raw editing values are shown in the left panel. The panel on the right shows a graphical representation of the raw editing values, where C to G base editing is graphically shown by dotted bars (G) going to filled bars (C).

[0077] FIG. 51 shows base editing at the FANCF site in MSH2−/− cells using six base editors (BE3; BE3_UdgX; BE3_UdgX*; BE2_UdgX_On; BE3_UdgX_On; and BE3_UNG). Raw editing values are shown in the left panel. The panel on the right shows a graphical representation of the raw editing values, where C to G base editing is graphically shown by filled bars (C) going to dotted bars (G).

[0078] FIG. 52 shows a schematic illustrating a base editing approach where a C to G base editor containing a UDG (or a UDG variant), a Cas9 (e.g., nCas9) domain, and a cytidine deaminase is expressed in trans with a translesion polymerase.

[0079] FIG. 53 shows base editing at the HEK2 site in HEK293 cells using five base editors (BE3; BE3_UdgX; BE3_UdgX*; BE2_UdgX_On; and BE3_UDG) expressed, in trans, with various polymerases (Pol Kappa, Pol Eta, Pol Iota, REV1, Pol Beta, and Pol Delta). C to G base editing is graphically shown by dotted bars (G) going to filled bars (C).

[0080] FIG. 54 shows base editing at the RNF2 site in HEK293 cells using five base editors (BE3; BE3_UdgX; BE3_UdgX*; BE2_UdgX_On; and BE3_UDG) expressed, in trans, with various polymerases (Pol Kappa, Pol Eta, Pol Iota, REV1, Pol Beta, and Pol Delta). C to G base editing is graphically shown by dotted bars (G) going to filled bars (C).

[0081] FIG. 55 shows base editing at the FANCF site in HEK293 cells using five base editors (BE3; BE3_UdgX; BE3_UdgX*; BE2_UdgX_On; and BE3_UDG) expressed, in trans, with various polymerases (Pol Kappa, Pol Eta, Pol Iota, REV1, Pol Beta, and Pol Delta). C to G base editing is graphically shown by filled bars (C) going to dotted bars (G).

[0082] FIGS. 56A-56C show development of prototype C•G-to-G•C base editors. FIG. 56A: Potential pathway for C•G-to-G•C conversion. FIG. 56B: C•G-to-G•C editing outcomes in HEK293T cells for C-terminal fusions of DNA glycosylases to BE4B (AC, APOBEC1 cytidine deaminase-Cas9 nickase). FIG. 56C: Different fusion protein architectures lead to different C•G-to-G•C editing properties in HEK293T cells at the HEK3 locus for the Apo-UdgX-Cas9n (AXC) architecture. Values and error bars reflect the mean and standard deviation of three biological replicates, shown as individual data points. HEK2=HEK site 2; HEK3=HEK site 3; HEK4=HEK site 4. C4, C6, and similar annotations indicate the in-window target nucleotides where the SpCas9 PAM is at positions 21-23.

[0083] FIGS. 57A-57D show a CRISPRi knockdown screen across 476 genes enriched for those with roles in DNA repair to identify candidate regulators of C•G-to-G•C editing. FIG. 57A: Schematic of screen design. FIG. 57B: Summary of base editing outcomes in BE4B (also AC) screen. Bottom left—all editing outcomes containing only point mutations present at >=1% frequency for non-targeting CRISPRi guide RNAs. Line plots above the individual outcomes show the total editing frequency (black line) and the frequencies of each single base edit (C-to-T=“★”, C-to-G=“Δ”, C-to-A=“⋆”, and G-to-C=“⋄”) at each position. Line plots to the right show frequencies of outcomes for specific CRISPRi guide RNAs (blue−average of all non-targeting guide+/−standard deviation across individual non-targeting guide RNAs; top 2 most active UNG guide RNAs are labeled according to the legend provided). Heatmaps show log 2 fold changes in outcome frequencies for top 2 UNG guide RNAs relative to non-targeting guide RNAs. FIG. 57C: Log₂ fold changes in frequency of outcomes containing C-to-T or C-to-G edits for each CRISPRi guide compared to non-targeting guide RNAs. Upper left—comparison of changes in C-to-T editing between two biological replicates. Lower right—comparison of changes in C-to-G editing between replicates. Upper right—comparison of changes in C-to-G editing to changes in C-to-T editing in replicate 1. All guide RNAs with at least 500 recovered UMIs in each replicate are plotted. Blue dots: individual non-targeting guide RNAs, orange dots: UNG guide RNAs, green dots: ASCC3 guide RNAs, red dots: RFWD3 guide RNAs, grey dots: all other guide RNAs. FIG. 57D: Effects of gene knockdown on relative C-to-G editing frequencies in BE4B screen. Each dot represents a gene, with the x-value representing the average of the two strongest Log₂ fold changes in normalized C-to-G editing for guide RNAs targeting the gene from the average of all non-targeting guide RNAs, and the y-value representing a gene-level p-value summarizing the combined statistical significance of all guide RNAs targeting each gene (two-sided, uncorrected for multiple comparisons). Rep.=replicate.

[0084] FIGS. 58A-58B show the effect of varying the cytidine deaminase and Cas9 components of CGBEs on C•G-to-G•C editing outcomes in HEK293T cells. FIG. 58A: C•G-to-G•C editing outcomes for catalytically impaired, narrow-window cytidine deaminases show higher editing purity at HEK2 and RNF2. FIG. 58B: C•G-to-G•C editing outcomes for high-fidelity Cas9 variants show altered editing windows and improved CGBE performance at some positions. “Cas9” represents the Cas9 D10A nickase variant of each Cas effector. Values and error bars reflect the mean and standard deviation of three biological replicates, shown as individual data points. HEK2=HEK site 2; HEK3=HEK site 3; HEK4=HEK site 4. C4, C6, and similar annotations indicate the in-window target nucleotides where the SpCas9 PAM is at positions 21-23.

[0085] FIGS. 59A-59B show that novel engineered CGBEs with various DNA repair proteins, deaminases, Cas proteins, and architectures offer diverse editing performance on different target sites. FIG. 59A: C•G-to-G•C editing performance of CGBEs at eight genomic loci in HEK293T cells. FIG. 59B: Further characterization of C•G-to-G•C editing outcomes for 12 variants from FIG. 59A at various genomic loci in HEK293T cells. Values and error bars reflect the mean and standard deviation of three biological replicates. HEK2=HEK293T cells site 2; HEK3=HEK293T cells site 3; HEK4=HEK293T cells site 4. C nucleotide annotations indicate the target nucleotide positions in the protospacer, where the SpCas9 PAM is at positions 21-23.

[0086] FIGS. 60A-60I show target library characterization and machine learning modeling of 10 CGBE variants. FIG. 60A: Overview of genome-integrated target library assay. Libraries of 12,000 or 4,000 pairs of sgRNAs and corresponding target sites are integrated into the genomes of mammalian cells using Tol2 transposase and treated with base editors. Edited cells are enriched by antibiotic selection, and library cassettes are amplified for high-throughput sequencing. FIG. 60B: Base editing windows. Values are C•G-to-G•C editing efficiencies normalized to a maximum of 100. The protospacer is at positions 1-20, with the SpCas9 PAM at positions 21-23. All data are in mES cells except for eA3A-nCas9, which is in HEK293T cells. FIG. 60C: C•G-to-G•C editing purity in the comprehensive context library in mES cells. Box plots indicate median and interquartile range, whiskers indicate extrema, and black dots indicate mean. Two-sided Welch's T-test*P≤5.1×10-9. FIG. 60D: Heatmap of observed C•G-to-G•C purities by CGBE in target contexts from the comprehensive context library in mES cells. Black nucleotides indicate the cytosine for which purity is calculated. Target sites were sorted by outcome variance and manually selected. FIG. 60E: Clustering of CGBEs based on measured C•G-to-G•C purity in core window cytosines across the comprehensive context library in mESCs. Values are Pearson correlation. FIG. 60F: Purity of editing outcomes across core window nucleotides in the comprehensive context library, ranked by C•G-to-G•C purity, averaged across CGBEs in mESCs. Trend lines and shading show the rolling mean and standard deviation across 1% intervals. FIG. 60G: Representative sequence motifs for editing efficiency and C•G-to-G•C purity from logistic regression models. The sign of each learned weight indicates a contribution above (positive sign) or below (negative sign) the mean activity. Logo opacity is proportional to the motif's Pearson's R on held-out sequence contexts. FIG. 60H: Observed C•G-to-G•C purity across CGBEs in mESCs compared to CGBE-Hive predictions. Trend lines and shading show the rolling mean and standard deviation. FIG. 60I: Sequence motifs for C•G-to-G•C editing yield.

[0087] FIGS. 61A-61F show target library characterization and machine learning modeling of CGBE variants. FIG. 61A: Observed C-to-G purity by CGBE at SNVs predicted to have >80% C-to-G purity. Box plot indicates median and interquartile range, and whiskers indicate extrema. FIG. 61B: Observed number of disease-related sgRNA-target pairs corrected at varying genotype precision and amino acid precision thresholds by various strategies for selecting CGBEs.. FIG. 61C: Comparison of predicted versus observed correction yield of disease-related transversion SNVs in mES cells. Trend lines and shading show the rolling mean and standard deviation. FIG. 61D: Comparison of predicted versus observed correction precision of disease-related transversion SNVs in mES cells. Trend lines and shading show the rolling mean and standard deviation. FIG. 61E: Observed number of sgRNA-target pairs containing disease-related transversion SNVs corrected at various thresholds for genotype and amino acid precision. FIG. 61F: Installation of disease-associated SNPs using CGBEs.

[0088] FIGS. 62A-62D show that HAP1 cells lacking UNG, APE1, REV1, or MLH1 show minimal differences in C•G-to-G•C editing outcomes. C•G-to-G•C editing yield and product purity of BE1 (nuclease inactive, no UGIs), BE4B (D10A nickase, no UGIs; also AC) and AXC (APOBEC1-UdgX-Cas9 D10A, the prototype CGBE), in HAP1 knockout haploid human cell lines lacking (FIG. 62A) UNG, (FIG. 62B) APE1, (FIG. 62C) REV1, and (FIG. 62D) MLH1. Values and error bars reflect the mean and standard deviation of three biological replicates, shown as individual data points, except HEK2 editing in REV1-cells shows two biological replicates. HEK2=HEK293T cells site 2; HEK3=HEK293T cells site 3; HEK4=HEK293T cells site 4. C4, C6, and similar annotations indicate the in-window target nucleotides where the SpCas9 PAM is at positions 21-23.

[0089] FIGS. 63A-63B show the effects of polymerase or GFP fusions on C•G-to-G•C editing outcomes. FIG. 63A: C•G-to-G•C editing outcomes in HEK293T cells using N-terminal polymerase fusions to AXC (Polymerase-AXC). GFP-AXC and AXC are shown as controls. FIG. 63B: C•G-to-G•C editing outcomes in HEK293T cells using C-terminal polymerase fusions to AXC (AXC-Polymerase). AXC-GFP is shown as a control with AXC reproduced from FIG. 63A for ease of comparison. C•G-to-G•C editing yield is shown on the x-axis and product purity is shown on the y-axis. Window position annotations indicate the in-window target nucleotides where the SpCas9 PAM is at positions 21-23. Values and error bars reflect the mean and standard deviation of three biological replicates. HEK2=HEK293T cells site 2; HEK3=HEK293T cells site 3; HEK4=HEK293T cells site 4.

[0090] FIGS. 64A-64C show additional CRISPRi screen outcomes. FIG. 64A: Summary of base editing outcomes in BE1 screen. Bottom left: all editing outcomes containing only point mutations present at >1% frequency for non-targeting control CRISPRi guide RNAs, ordered by frequency. Line plots above the individual outcomes show the total editing frequency (black line) and the frequencies of each type of single-base mutation (C-to-T=“★”, C-to-G=“Δ”, C-to-A=“⋆”, and G-to-C=“⋄”) at each position. Right: frequencies of outcomes for specific CRISPRi guide RNAs (blue=mean±SD of all non-targeting CRISPRi guide RNAs; orange=the top two most active UNG-targeting CRISPRi guide RNAs). Heatmaps show log₂ fold changes in outcome frequencies for the two most active UNG-targeting CRISPRi guide RNAs relative to non-targeting control CRISPRi guide RNAs. FIG. 64B: Frequency of editing outcome categories in screens. FIG. 64C: Log₂ fold changes in frequency of specific editing outcomes containing C-to-T mutations for UNG-targeting CRISPRi guide RNAs in BE1 (orange) and BE4B (blue) screens. Intervals are 95% Clopper-Pearson binomial confidence intervals for the observed frequencies of each outcome category given the number of UMIs recovered for each CRISPRi guide RNA, converted into log 2 fold changes. Rep.=replicate.

[0091] FIGS. 65A-65E show the effects of gene knockdown on editing outcomes by category. Each dot in scatter plots represents a gene, with the x-value representing the average of the two strongest log 2 fold changes in the frequency of the relevant outcome category for CRISPRi guide RNAs targeting that gene compared to the average of all non-targeting guide RNAs, and the y-value representing a gene-level p-value summarizing the combined statistical significance of all guide RNAs targeting each gene. In each panel, the genes with the largest negative (blue) and positive (red) average log 2 fold changes across two replicates that achieve a p-value less than or equal to 10-5 in either replicate are labeled (up to 5 genes labeled). Additional genes with phenotypes referenced in the text are also labeled (black). P-values represent two-sided tests without correction for multiple comparisons. Outcome categories are as follows: FIG. 65A: Outcomes containing any deletion. FIG. 65B: Outcomes containing C•G-to-T•A point mutations, as a fraction of outcomes containing any point mutations. FIG. 65C: Outcomes containing point mutations at specific positions, as a fraction of outcomes containing any point mutation (where the SaCas9 NNGRRT (SEQ ID NO: 223) PAM occupies positions 22-27). The 5 most highly modified positions were included. FIG. 65D: Outcomes containing C•G-to-G•C point mutations, as a fraction of outcomes containing any point mutations. FIG. 65E: Outcomes containing only point mutations. Rep.=replicate.

[0092] FIGS. 66A-66B show phenotypes for CRISPRi guide RNAs targeting RECQL and HLTF. FIG. 66A: Effect of RECQL knockdown on editing window in BE4B screens. Bottom left: most frequent point mutation editing outcomes, ordered by average log₂ fold changes in frequency from non-targeting caused by two most active RECQL guide RNAs in replicate 1. Heatmaps show log 2 fold changes from non-targeting guide RNAs. Line plots above outcome diagrams show differences in total editing rates at each position between the top two CRISPRi RECQL guide RNAs and non-targeting guide RNAs. FIG. 66B: Effect of HLTF knockdown on editing window in BE4 (top) and BE1 (bottom) screens. Diagrams show the three most frequent outcomes with an edit at position +3 (where positions 22-27 are the SaCas9 NNGRRT (SEQ ID NO: 223) PAM) for non-targeting CRISPRi guide RNAs. Line plots above outcomes show differences in total editing rates at each position between HLTF guide RNAs and non-targeting guide RNAs. Line plots to the right of outcomes show frequencies of outcomes for specific CRISPRi guide RNAs in replicate 1 (blue (darker shade)=average frequency of each outcome across all non-targeting guide RNAs+/−standard deviation across individual non-targeting guide RNAs; pink (lighter shade)=frequency of each outcome for top 2 HLTF guide RNAs). Heatmaps show log 2 fold changes from non-targeting CRISPRi guide RNAs. Rep.=replicate.

[0093] FIGS. 67A-67B show that fusion of proteins to AXC scaffold alters C•G-to-G•C editing outcomes in HEK293T cells. FIG. 67A: C•G-to-G•C editing outcomes of CGBE candidates containing proteins identified in the screen as N-terminal fusions. FIG. 67B: C•G-to-G•C editing outcomes of CGBE candidates containing tandem fusion of proteins identified in the screen. C•G-to-G•C editing yield is shown on the x-axis and product purity is shown on the y-axis. Values and error bars reflect the mean and standard deviation of three biological replicates. Window position annotations indicate the in-window target nucleotides where the SpCas9 PAM is at positions 21-23. HEK2=HEK293T cells site 2; HEK3=HEK293T cells site 3; HEK4=HEK293T cells site 4.

[0094] FIG. 68 shows the optimization of linkers between CGBE components. C•G-to-G•C editing outcomes for CGBE candidates with 1-aa, 32-aa, or 60-aa linkers. Values and error bars reflect the mean and standard deviation of three biological replicates, shown as individual data points. HEK2=HEK293T cells site 2; HEK3=HEK293T cells site 3; HEK4=HEK293T cells site 4. C4, C6, and similar annotations indicate the in-window target nucleotides where the SpCas9 PAM is at positions 21-23.

[0095] FIG. 69 shows that split-intein and non-split CGBE variants edit with similar yield and product purity. C•G-to-G•C editing outcomes for split-intein (light bars) and non-split (dark bars) CGBE variants tested in HEK293T cells at five genomic loci. Values and error bars reflect the mean and standard deviation of three biological replicates, shown as individual data points. HEK2=HEK293T cells site 2; HEK3=HEK293T cells site 3; HEK4=HEK293T cells site 4. C4, C6, and similar annotations indicate the in-window target nucleotides where the SpCas9 PAM is at positions 21-23.

[0096] FIGS. 70A-70B show performance of CGBE variants in K562, U2OS, and HeLa cells. C•G-to-G•C editing outcomes in K562 cells (left column), U2OS cells (middle column), and HeLa cells (right column) at six target cytosines across five genomic loci. Editor identities are depicted at the bottom of the figure. C•G-to-G•C editing yield is shown on the x-axis and product purity is shown on the y-axis. Window position annotations indicate the in-window target nucleotides where the SpCas9 PAM is at positions 21-23. Values and error bars reflect the mean and standard deviation of three biological replicates. HEK2=HEK293T cells site 2; HEK3=HEK293T cells site 3.

[0097] FIG. 71 shows CGBE activity using Cas9-NG. C•G-to-G•C editing outcomes in HEK293T cells using CGBE variants containing Cas9-NG at eight target cytosines across seven genomic loci. C•G-to-G•C editing yield is shown on the x-axis and product purity is shown on the y-axis. Values and error bars reflect the mean and standard deviation of three biological replicates. Window position annotations indicate the in-window target nucleotides where the SpCas9 PAM is at positions 21-23. HEK2=HEK293T cells site 2; HEK3=HEK293T cells site 3; HEK4=HEK293T cells site 4; HEK4.1=HEK293T cells site 4.1.

[0098] FIG. 72 shows on-target CGBE editing profiles for off-target analyses. C•G-to-G•C editing outcomes in HEK293T cells using nicking CGBEs at eight target cytosines across seven genomic loci). Editor identities are depicted at the bottom of the figure. C•G-to-G•C editing yield is shown on the x-axis and product purity is shown on the y-axis. Values and error bars reflect the mean and standard deviation of three biological replicates. Window position annotations indicate the in-window target nucleotides where the SpCas9 PAM is at positions 21-23. HEK2=HEK293T cells site 2; HEK3=HEK293T cells site 3; HEK4=HEK293T cells site 4; HEK4.1=HEK293T cells site 4.1.

[0099] FIGS. 73A-73D show transversion-enriched SNV library analysis. FIG. 73A: Heatmap of observed C•G-to-G•C purities by CGBE variants in target contexts from the transversion-enriched SNV library in mES cells. Underlined nucleotides indicate the cytosine for which purity is calculated. Target sites were sorted by outcome variance and manually selected. FIG. 73B: Replicate consistency statistics. FIG. 73C: Scatter plots of base editing efficiency between experimental replicates. Each point represents a single target site. FIG. 73D: Scatter plots of editing purities between experimental replicates. Each point represents a unique editing pattern in a target site. Scatter plot is plotted across 30 library members.

[0100] FIG. 74 shows a comparison of CGBEs developed herein with recently described CGBEs. C•G-to-G•C editing outcomes for CGBEs reported in this study compared with that of mini CGBE1¹⁴, CGBE1¹⁴, APO1-nCas9-UNG¹⁵, and APO1-nCas9-XRCC1¹¹ at 11 different target cytidines across eight genomic loci. C•G-to-G•C editing yield is shown on the x-axis and product purity is shown on the y-axis. Values and error bars reflect the mean and standard deviation of three biological replicates. Window position annotations indicate the in-window target nucleotides where the SpCas9 PAM is at positions 21-23. HEK2=HEK293T cells site 2; HEK3=HEK293T cells site 3; HEK4=HEK293T cells site 4; HEK4.1=HEK293T cells site 4.1.

[0101] FIGS. 75A-75B show a comparison of prime editing and CGBE editing outcomes. FIG. 75A: C•G-to-G•C editing outcomes in HEK293T cells using prime editor 2 (PE2) to identify the best-performing pegRNA to make six different edits at four genomic loci (HEK site 3, FANCF, RNF2, and HBBa). FIG. 75B: Comparison of CGBE variants with PE2 and prime editor 3 (PE3) editors at four genomic loci. PE3 editors use an additional sgRNA to nick the non-edited DNA strand. Values and error bars reflect the mean and standard deviation of three biological replicates. C•G-to-G•C editing yield is shown on the x-axis and product purity is shown on the y-axis in FIG. 75B. HEK3=HEK site 3. C4, C6, and similar annotations indicate the in-window target nucleotides where the SpCas9 PAM is at positions 21-23.

[0102] FIGS. 76A-76B show off-target DNA editing activities of CGBEs. CGBE activity at 13 off-target loci. Values and error bars reflect the mean and standard deviation of three biological replicates. HEK2=HEK293T cells site 2; HEK3=HEK293T cells site 3; HEK4=HEK293T cells site 4. X=UdgX, D2=POLD2, RB=RBMX, 689=Anc689, HF=HF-nCas9, eA3A*=eA3A T31A.

### DEFINITIONS

[0103] As used herein and in the claims, the singular forms “a,” “an,” and “the” include the singular and the plural unless the context clearly indicates otherwise. Thus, for example, a reference to “an agent” includes a single agent and a plurality of such agents.

[0104] The term “deaminase” or “deaminase domain,” as used herein, refers to a protein or enzyme that catalyzes a deamination reaction. In some embodiments, the deaminase or deaminase domain is a cytidine deaminase, catalyzing the hydrolytic deamination of cytidine or deoxycytidine to uridine or deoxyuridine, respectively. In some embodiments, the deaminase or deaminase domain is a cytidine deaminase domain, catalyzing the hydrolytic deamination of cytosine to uracil. In some embodiments, the deaminase or deaminase domain is a naturally-occurring deaminase from an organism, such as a human, chimpanzee, gorilla, monkey, cow, dog, rat, or mouse. In some embodiments, the deaminase or deaminase domain is a variant of a naturally-occurring deaminase from an organism that does not occur in nature. For example, in some embodiments, the deaminase or deaminase domain is at least 50%, at least 55%, at least 60%, at least 65%, at least 70%, at least 75% at least 80%, at least 85%, at least 90%, at least 95%, at least 96%, at least 97%, at least 98%, at least 99%, or at least 99.5% identical to a naturally-occurring deaminase from an organism.

[0105] The term “base editor (BE),” or “nucleobase editor (NBE)” refers to an agent comprising a polypeptide that is capable of making a modification to a base (e.g., A, T, C, G, or U) within a nucleic acid sequence (e.g., DNA or RNA). In some embodiments, the base editor is capable of deaminating a base within a nucleic acid. In some embodiments, the base editor is capable of deaminating a base within a DNA molecule. In some embodiments, the base editor is capable of deaminating a cytosine (C) in DNA. In some embodiments, the base editor is capable of excising a base within a DNA molecule. In some embodiments, the base editor is capable of excising an adenine, guanine, cytosine, thymine or uracil within a nucleic acid (e.g., DNA or RNA) molecule. In some embodiments, the base editor is a protein (e.g., a fusion protein) comprising a nucleic acid programmable DNA binding protein (napDNAbp) fused to a cytidine deaminase. In some embodiments, the base editor is fused to a uracil binding protein (UBP), such as a uracil DNA glycosylase (UDG). In some embodiments, the base editor is fused to a nucleic acid polymerase (NAP) domain. In some embodiments, the NAP domain is a translesion DNA polymerase. In some embodiments, the base editor comprises a napDNAbp, a cytidine deaminase and a UBP (e.g., UDG). In some embodiments, the base editor comprises a napDNAbp, a cytidine deaminase and a nucleic acid polymerase (e.g., a translesion DNA polymerase). In some embodiments, the base editor comprises a napDNAbp, a cytidine deaminase, a UBP (e.g., UDG), and a nucleic acid polymerase (e.g., a translesion DNA polymerase).

[0106] In some embodiments, the napDNAbp of the base editor is a Cas9 domain. In some embodiments, the base editor comprises a Cas9 protein fused to a cytidine deaminase. In some embodiments, the base editor comprises a Cas9 nickase (nCas9) fused to a cytidine deaminase. In some embodiments, the Cas9 nickase comprises a D10A mutation and comprises a histidine at residue 840 of SEQ ID NO: 6, or a corresponding mutation in any Cas9 provided herein, such as any one of SEQ ID NOs: 4-26, which renders Cas9 capable of cleaving only one strand of a nucleic acid duplex. In some embodiments, the base editor comprises a nuclease-inactive Cas9 (dCas9) fused to a cytidine deaminase.

[0107] In some embodiments, the dCas9 domain comprises a D10A and a H840A mutation of SEQ ID NO: 6, or a corresponding mutation in any Cas9 provided herein, such as any one of SEQ ID NOs: 4-26, which inactivates the nuclease activity of the Cas9 protein. In some embodiments, the base editor comprises a nuclease-inactive Cas9 (dCas9) fused to a deaminase which binds a nucleic acid in a guide RNA-programmed manner via the formation of an R-loop, but does not cleave the nucleic acid. For example, the dCas9 domain of the fusion protein may include a D10A and a H840A mutation (which renders Cas9 capable of cleaving only one strand of a nucleic acid duplex), as described in PCT/US2016/058344, which published as WO 2017/070632 on Apr. 27, 2017 and is incorporated herein by reference in its entirety. The DNA cleavage domain of S. pyogenes Cas9 includes two subdomains, the HNH nuclease subdomain and the RuvC1 subdomain. The HNH subdomain cleaves the strand complementary to the gRNA (the “targeted strand”, or the strand in which editing or deamination occurs), whereas the RuvC1 subdomain cleaves the non-complementary strand containing the PAM sequence (the “non-edited strand”). The RuvC1 mutant D10A generates a nick in the targeted strand, while the HNH mutant H840A generates a nick on the non-edited strand (see Jinek et al., Science, 337:816-821(2012); Qi et al., Cell. 28; 152(5):1173-83 (2013), each of which are incorporated by reference herein).

[0108] In some embodiments, a base editor is a macromolecule or macromolecular complex that results primarily (e.g., more than 80%, more than 85%, more than 90%, more than 95%, more than 99%, more than 99.9%, or 100%) in the conversion of a nucleobase in a polynucleic acid sequence into another nucleobase (i.e., a transition or transversion) using a combination of 1) a nucleotide-, nucleoside-, or nucleobase-modifying enzyme and 2) a nucleic acid binding protein that can be programmed to bind to a specific nucleic acid sequence.

[0109] In some embodiments, the base editor comprises a DNA binding domain (e.g., a programmable DNA binding domain such as a dCas9 or nCas9) that directs it to a target sequence. In some embodiments, the base editor comprises a nucleobase modifying enzyme fused to a programmable DNA binding domain (e.g., a dCas9 or nCas9). A “nucleobase modifying enzyme” is an enzyme that can modify a nucleobase and convert one nucleobase to another (e.g., a cytidine deaminase). In some embodiments, the base editor may target cytosine (C) bases in a nucleic acid sequence and convert the C to guanine (G) base. In some embodiments, the C to G editing is carried out in part by a deaminase, e.g., a cytidine deaminase.

[0110] Base editors that deaminate a C, in some embodiments, comprise a cytidine deaminase. A “cytidine deaminase” refers to an enzyme that catalyzes the chemical reaction “cytosine+H₂O→uracil+NH₃” or “5-methyl-cytosine+H₂O→thymine+NH₃.” As it may be apparent from the reaction formula, such chemical reactions result in a C to U nucleobase change. In the context of a gene, such a nucleotide change, or mutation, may in turn lead to an amino acid change in the protein, which may affect the protein's function, e.g., loss-of-function or gain-of-function. In some embodiments, the CGBE comprises a dCas9 or nCas9 fused to a cytidine deaminase. In some embodiments, the cytidine deaminase domain is fused to the N-terminus of the dCas9 or nCas9. In some embodiments, the base editor further comprises a domain that inhibits uracil glycosylase, and/or a nuclear localization signal. Such base editors have been described in the art, e.g., in Rees & Liu, Nat Rev Genet. 2018; 19(12):770-788 and Koblan et al., Nat Biotechnol. 2018; 36(9):843-846; as well as. U.S. Patent Publication No. 2018/0073012, published Mar. 15, 2018, which issued as U.S. Pat. No. 10,113,163; on Oct. 30, 2018; U.S. Patent Publication No. 2017/0121693, published May 4, 2017, which issued as U.S. Pat. No. 10,167,457 on Jan. 1, 2019; International Publication No. WO 2017/070633, published Apr. 27, 2017; U.S. Patent Publication No. 2015/0166980, published Jun. 18, 2015; U.S. Pat. No. 9,840,699, issued Dec. 12, 2017; U.S. Pat. No. 10,077,453, issued Sep. 18, 2018; International Publication No. WO 2018/165629, published Sep. 13, 2018; International Publication No. WO 2019/023680, published Jan. 31, 2019; International Publication No. WO 2019/226593, published Nov. 28, 2019; International Publication No. WO 2018/0176009, published Sep. 27, 2018, International Publication No. WO 2020/041751, published Feb. 27, 2020; International Publication No. WO 2020/051360, published Mar. 12, 2020; International Publication No. WO 2020/102659, published May 22, 2020; International Publication No. WO 2020/086908, published Apr. 30, 2020; International Publication No. WO 2020/181180, published Sep. 10, 2020; International Publication No. WO 2020/181195, published Sep. 10, 2020; International Publication No. WO 2020/214842, published Oct. 22, 2020; International Publication No. WO 2020/092453, published May 7, 2020; International Publication No. WO2020/236982, published Nov. 26, 2020; International Application No. PCT/US2020/624628, filed Nov. 25, 2020; International Publication No. WO 2021/108717, published Jun. 3, 2021, and International Application No. PCT/US2021/016827, which published as International Publication No. WO 2021/158921 on Aug. 12, 2021, the contents of each of which are incorporated herein by reference in their entireties.

[0111] The term “base editing” refers to genome editing technology that involves the conversion of a specific nucleic acid base into another at a targeted genomic locus. In certain embodiments, this can be achieved without requiring double-stranded DNA breaks (DSB), or single stranded breaks (i.e., nicking). To date, other genome editing techniques, including CRISPR-based systems, begin with the introduction of a DSB at a locus of interest. Subsequently, cellular DNA repair enzymes mend the break, commonly resulting in random insertions or deletions (indels) of bases at the site of the DSB. However, when the introduction or correction of a point mutation at a target locus is desired rather than stochastic disruption of the entire gene, these genome editing techniques are unsuitable, as correction rates are low (e.g. typically 0.1% to 5%), with the major genome editing products being indels. In order to increase the efficiency of gene correction without simultaneously introducing random indels, the present inventors previously modified the CRISPR/Cas9 system to directly convert one DNA base into another without DSB formation. See, Komor, A. C., et al., Programmable editing of a target base in genomic DNA without double-stranded DNA cleavage. Nature 533, 420-424 (2016), the entire contents of which is incorporated by reference herein.

[0112] The term “linker,” as used herein, refers to a bond (e.g., covalent bond), chemical group, or a molecule linking two molecules or moieties, e.g., two domains of a fusion protein, such as, for example, a nuclease-inactive Cas9 domain and a nucleic acid-editing domain (e.g., an cytidine deaminase). In some embodiments, a linker joins a gRNA binding domain of an RNA-programmable nuclease, including a Cas9 nuclease domain, and the catalytic domain of a nucleic-acid editing protein. In some embodiments, a linker joins a dCas9 and a nucleic-acid editing protein. Typically, the linker is positioned between, or flanked by, two groups, molecules, or other moieties and connected to each one via a covalent bond, thus connecting the two. In some embodiments, the linker is an amino acid or a plurality of amino acids (e.g., a peptide or protein). In some embodiments, the linker is an organic molecule, group, polymer, or chemical moiety. In some embodiments, the linker is 5-100 amino acids in length, for example, 5, 6, 7, 8, 9, 10, 11, 12, 13, 14, 15, 16, 17, 18, 19, 20, 21, 22, 23, 24, 25, 26, 27, 28, 29, 30, 30-35, 35-40, 40-45, 45-50, 50-60, 60-70, 70-80, 80-90, 90-100, 100-150, or 150-200 amino acids in length. Longer or shorter linkers are also contemplated. In some embodiments, a linker comprises the amino acid sequence SGSETPGTSESATPES (SEQ ID NO: 102), which may also be referred to as the XTEN linker. In some embodiments, a linker comprises the amino acid sequence SGGS (SEQ ID NO: 103). In some embodiments, a linker comprises (SGGS)ₙ(SEQ ID NO: 103), (GGGS)ₙ(SEQ ID NO: 104), (GGGGS)ₙ (SEQ ID NO: 105), (G)ₙ (SEQ ID NO: 121), (EAAAK)ₙ (SEQ ID NO: 106), (GGS)ₙ (SEQ ID NO: 122), SGSETPGTSESATPES (SEQ ID NO: 102), (XP)ₙ motif (SEQ ID NO: 123), SGGSSGSETPGTSESATPESSGGS (SEQ ID NO: 107), SGGSSGGSSGSETPGTSESATPESSGGSSGGS (SEQ ID NO: 108), GGSGGSPGSPAGSPTSTEEGTSESATPESGPGTSTEPSEGSAPGSPAGSPTSTEEGTSTE PSEGSAPGTSTEPSEGSAPGTSESATPESGPGSEPATSGGSGGS (SEQ ID NO: 109), SGGSGGSGGS (SEQ ID NO: 120), or a combination of any of these, wherein n is independently an integer between 1 and 30, and wherein X is any amino acid. In some embodiments, n is 1, 2, 3, 4, 5, 6, 7, 8, 9, 10, 11, 12, 13, 14, or 15.

[0113] The term “mutation,” as used herein, refers to a substitution of a residue within a sequence, e.g., a nucleic acid or amino acid sequence, with another residue, or a deletion or insertion of one or more residues within a sequence. Mutations are typically described herein by identifying the original residue followed by the position of the residue within the sequence and by the identity of the newly substituted residue. Various methods for making the amino acid substitutions (mutations) provided herein are well known in the art, and are provided by, for example, Green and Sambrook, Molecular Cloning: A Laboratory Manual (4^{th} ed., Cold Spring Harbor Laboratory Press, Cold Spring Harbor, N.Y. (2012)).

[0114] The term “uracil binding protein” or “UBP,” as used herein, refers to a protein that is capable of binding to uracil. In some embodiments, the uracil binding protein is a uracil modifying enzyme. In some embodiments, the uracil binding protein is a uracil base excision enzyme. In some embodiments, the uracil binding protein is a uracil DNA glycosylase (UDG). In some embodiments, a uracil binding protein binds uracil with an affinity that is at least 1%, 2%, 3%, 5%, 10%, 15%, 20%, 30%, 40%, 50%, 60%, 70%, 80%, 90%, or at least 95% of the affinity that a wild type UDG (e.g., a human UDG) binds to uracil.

[0115] The term “base excision enzyme” or “BEE,” as used herein, refers to a protein that is capable of removing a base (e.g., A, T, C, G, or U) from a nucleic acid molecule (e.g., DNA or RNA). In some embodiments, a BEE is capable of removing a cytosine from DNA.

[0116] In some embodiments, a BEE is capable of removing a thymine from DNA. Exemplary BEEs include, without limitation UDG Tyr147Ala, and UDG Asn204Asp as described in Sang et al., “A Unique Uracil-DNA binding protein of the uracil DNA glycosylase superfamily,” Nucleic Acids Research, Vol. 43, No. 17 2015; the entire contents of which are hereby incorporated by reference.

[0117] The term “nucleic acid polymerase” or “NAP,” refers to an enzyme that synthesizes nucleic acid molecules (e.g., DNA and RNA) from nucleotides (e.g., deoxyribonucleotides and ribonucleotides). In some embodiments, the NAP is a DNA polymerase. In some embodiments, the NAP is a translesion polymerase. Translesion polymerases play a role in mutagenesis, for example, by restarting replication forks or filling in gaps that remain in the genome due to the presence of DNA lesions. Exemplary translesion polymerases include, without limitation, Pol Beta, Pol Lambda, Pol Eta, Pol Mu, Pol Iota, Pol Kappa, Pol Alpha, Pol Delta, Pol Gamma, and Pol Nu.

[0118] The term “nuclear localization sequence” or “NLS” refers to an amino acid sequence that promotes import of a protein into the cell nucleus, for example, by nuclear transport. Nuclear localization sequences are known in the art and would be apparent to the skilled artisan. In some embodiments, the NLS is a monopartite NLS. In some embodiments, the NLS is a bipartite NLS. Bipartite NLSs are separated by a relatively short spacer sequence (e.g., from 2-20 amino acids, from 5-15 amino acids, or from 8-12 amino acids). For example, NLS sequences are described in Plank et al., international PCT application, PCT/EP2000/011690, filed Nov. 23, 2000, published as WO 2001/038547 on May 31, 2001; and Kethar, K. M. V., et al., “Application of bioinformatics-coupled experimental analysis reveals a new transport-competent nuclear localization signal in the nucleoptotein of Influenza A virus strain” BMC Cell Biol, 2008, 9: 22; the contents of each of which are incorporated herein by reference for their disclosure of exemplary nuclear localization sequences. In some embodiments, a NLS comprises the amino acid sequence PKKKRKV (SEQ ID NO: 41), MDSLLMNRRKFLYQFKNVRWAKGRRETYLC (SEQ ID NO: 42), KRTADGSEFESPKKKRKV (SEQ ID NO: 43), KRGINDRNFWRGENGRKTR (SEQ ID NO: 44), KKTGGPIYRRVDGKWRR (SEQ ID NO: 45), RRELILYDKEEIRRIWR (SEQ ID NO: 46), or AVSRKRKA (SEQ ID NO: 47).

[0119] The term “nucleic acid programmable DNA binding protein” or “napDNAbp” refers to a protein that associates with a nucleic acid (e.g., DNA or RNA), such as a guide nuclic acid, that guides the napDNAbp to a specific nucleic acid sequence. For example, a Cas9 protein can associate with a guide RNA that guides the Cas9 protein to a specific DNA sequence that has complementary to the guide RNA. In some embodiments, the napDNAbp is a class 2 microbial CRISPR-Cas effector. In some embodiments, the napDNAbp is a Cas9 domain, for example a nuclease active Cas9, a Cas9 nickase (nCas9), or a nuclease inactive Cas9 (dCas9). Examples of nucleic acid programmable DNA binding proteins include, without limitation, Cas9 (e.g., dCas9 and nCas9), CasX, CasY, Cpf1, C2c1, C2c2, C2C3, and Argonaute. It should be appreciated, however, that nucleic acid programmable DNA binding proteins also include nucleic acid programmable proteins that bind RNA. For example, the napDNAbp may be associated with a nucleic acid that guides the napDNAbp to an RNA. Other nucleic acid programmable DNA binding proteins are also within the scope of this disclosure, though they may not be specifically listed in this disclosure.

[0120] The term “Cas9” or “Cas9 domain” refers to an RNA-guided nuclease comprising a Cas9 protein, or a fragment thereof (e.g., a protein comprising an active, inactive, or partially active DNA cleavage domain of Cas9, and/or the gRNA binding domain of Cas9). A Cas9 nuclease is also referred to sometimes as a casn1 nuclease or a CRISPR (clustered regularly interspaced short palindromic repeat)-associated nuclease. CRISPR is an adaptive immune system that provides protection against mobile genetic elements (viruses, transposable elements and conjugative plasmids). CRISPR clusters contain spacers, sequences complementary to antecedent mobile elements, and target invading nucleic acids. CRISPR clusters are transcribed and processed into CRISPR RNA (crRNA). In type II CRISPR systems correct processing of pre-crRNA requires a trans-encoded small RNA (tracrRNA), endogenous ribonuclease 3 (mc) and a Cas9 protein. The tracrRNA serves as a guide for ribonuclease 3-aided processing of pre-crRNA. Subsequently, Cas9/crRNA/tracrRNA endonucleolytically cleaves linear or circular dsDNA target complementary to the spacer. The target strand not complementary to crRNA is first cut endonucleolytically, then trimmed 3′-5′ exonucleolytically. In nature, DNA-binding and cleavage typically requires protein and both RNAs. However, single guide RNAs (“sgRNA”, or simply “gNRA”) can be engineered so as to incorporate aspects of both the crRNA and tracrRNA into a single RNA species. See, e.g., Jinek M., Chylinski K., Fonfara I., Hauer M., Doudna J. A., Charpentier E. Science 337:816-821(2012), the entire contents of which is hereby incorporated by reference. Cas9 recognizes a short motif in the CRISPR repeat sequences (the PAM or protospacer adjacent motif) to help distinguish self versus non-self. Cas9 nuclease sequences and structures are well known to those of skill in the art (see, e.g., “Complete genome sequence of an M1 strain of Streptococcus pyogenes.” Ferretti et al., J. J., McShan W. M., Ajdic D. J., Savic D. J., Savic G., Lyon K., Primeaux C., Sezate S., Suvorov A. N., Kenton S., Lai H. S., Lin S. P., Qian Y., Jia H. G., Najar F. Z., Ren Q., Zhu H., Song L., White J., Yuan X., Clifton S. W., Roe B. A., McLaughlin R. E., Proc. Natl. Acad. Sci. U.S.A. 98:4658-4663(2001); “CRISPR RNA maturation by trans-encoded small RNA and host factor RNase III.” Deltcheva E., Chylinski K., Sharma C. M., Gonzales K., Chao Y., Pirzada Z. A., Eckert M. R., Vogel J., Charpentier E., Nature 471:602-607(2011); and “A programmable dual-RNA-guided DNA endonuclease in adaptive bacterial immunity.” Jinek M., Chylinski K., Fonfara I., Hauer M., Doudna J. A., Charpentier E. Science 337:816-821(2012), the entire contents of each of which are incorporated herein by reference). Cas9 orthologs have been described in various species, including, but not limited to, S. pyogenes and S. thermophilus. Additional suitable Cas9 nucleases and sequences will be apparent to those of skill in the art based on this disclosure, and such Cas9 nucleases and sequences include Cas9 sequences from the organisms and loci disclosed in Chylinski, Rhun, and Charpentier, “The tracrRNA and Cas9 families of type II CRISPR-Cas immunity systems” (2013) RNA Biology 10:5, 726-737; the entire contents of which are incorporated herein by reference. In some embodiments, a Cas9 nuclease has an inactive (e.g., an inactivated) DNA cleavage domain, that is, the Cas9 is a nickase.

[0121] A nuclease-inactivated Cas9 protein may interchangeably be referred to as a “dCas9” protein (for nuclease-“dead” Cas9). Methods for generating a Cas9 protein (or a fragment thereof) having an inactive DNA cleavage domain are known (See, e.g., Jinek et al., Science. 337:816-821(2012); Qi et al., “Repurposing CRISPR as an RNA-Guided Platform for Sequence-Specific Control of Gene Expression” (2013) Cell. 28; 152(5):1173-83, the entire contents of each of which are incorporated herein by reference). For example, the DNA cleavage domain of Cas9 is known to include two subdomains, the HNH nuclease subdomain and the RuvC1 subdomain. The HNH subdomain cleaves the strand complementary to the gRNA, whereas the RuvC1 subdomain cleaves the non-complementary strand. Mutations within these subdomains can silence the nuclease activity of Cas9. For example, the mutations D10A and H840A completely inactivate the nuclease activity of S. pyogenes Cas9 (Jinek et al., Science. 337:816-821(2012); Qi et al., Cell. 28; 152(5):1173-83 (2013)). In some embodiments, proteins comprising fragments of Cas9 are provided. For example, in some embodiments, a protein comprises one of two Cas9 domains: (1) the gRNA binding domain of Cas9; or (2) the DNA cleavage domain of Cas9. In some embodiments, proteins comprising Cas9 or fragments thereof are referred to as “Cas9 variants.” A Cas9 variant shares homology to Cas9, or a fragment thereof. For example, a Cas9 variant is at least about 70% identical, at least about 80% identical, at least about 90% identical, at least about 95% identical, at least about 96% identical, at least about 97% identical, at least about 98% identical, at least about 99% identical, at least about 99.5% identical, or at least about 99.9% identical to wild type Cas9. In some embodiments, the Cas9 variant may have 1, 2, 3, 4, 5, 6,7, 8, 9, 10, 11, 12, 13, 14, 15, 16, 17, 18, 19, 20, 21, 22, 21, 24, 25, 26, 27, 28, 29, 30, 31, 32, 33, 34, 35, 36, 37, 38, 39, 40, 41, 42, 43, 44, 45, 46, 47, 48, 49, 50, or more amino acid changes compared to wild type Cas9. In some embodiments, the Cas9 variant comprises a fragment of Cas9 (e.g., a gRNA binding domain or a DNA-cleavage domain), such that the fragment is at least about 70% identical, at least about 80% identical, at least about 90% identical, at least about 95% identical, at least about 96% identical, at least about 97% identical, at least about 98% identical, at least about 99% identical, at least about 99.5% identical, or at least about 99.9% identical to the corresponding fragment of wild type Cas9. In some embodiments, the fragment is at least 30%, at least 35%, at least 40%, at least 45%, at least 50%, at least 55%, at least 60%, at least 65%, at least 70%, at least 75%, at least 80%, at least 85%, at least 90%, at least 95% identical, at least 96%, at least 97%, at least 98%, at least 99%, or at least 99.5% of the amino acid length of a corresponding wild type Cas9.

[0122] In some embodiments, the fragment is at least 100 amino acids in length. In some embodiments, the fragment is at least 100, 150, 200, 250, 300, 350, 400, 450, 500, 550, 600, 650, 700, 750, 800, 850, 900, 950, 1000, 1050, 1100, 1150, 1200, 1250, or 1300 amino acids in length. In some embodiments, wild type Cas9 corresponds to Cas9 from Streptococcus pyogenes (NCBI Reference Sequence: NC_017053.1, SEQ ID NO: 1 (nucleotide); SEQ ID NO: 4 (amino acid)).

(SEQ ID NO: 1)
ATGGATAAGAAATACTCAATAGGCTTAGATATCGGCACAAATAGC
GTCGGATGGGCGGTGATCACTGATGATTATAAGGTTCCGTCTAAA
AAGTTCAAGGTTCTGGGAAATACAGACCGCCACAGTATCAAAAAA
AATCTTATAGGGGCTCTTTTATTTGGCAGTGGAGAGACAGCGGAA
GCGACTCGTCTCAAACGGACAGCTCGTAGAAGGTATACACGTCGG
AAGAATCGTATTTGTTATCTACAGGAGATTTTTTCAAATGAGATG
GCGAAAGTAGATGATAGTTTCTTTCATCGACTTGAAGAGTCTTTT
TTGGTGGAAGAAGACAAGAAGCATGAACGTCATCCTATTTTTGGA
AATATAGTAGATGAAGTTGCTTATCATGAGAAATATCCAACTATC
TATCATCTGCGAAAAAAATTGGCAGATTCTACTGATAAAGCGGAT
TTGCGCTTAATCTATTTGGCCTTAGCGCATATGATTAAGTTTCGT
GGTCATTTTTTGATTGAGGGAGATTTAAATCCTGATAATAGTGAT
GTGGACAAACTATTTATCCAGTTGGTACAAATCTACAATCAATTA
TTTGAAGAAAACCCTATTAACGCAAGTAGAGTAGATGCTAAAGCG
ATTCTTTCTGCACGATTGAGTAAATCAAGACGATTAGAAAATCTC
ATTGCTCAGCTCCCCGGTGAGAAGAGAAATGGCTTGTTTGGGAAT
CTCATTGCTTTGTCATTGGGATTGACCCCTAATTTTAAATCAAAT
TTTGATTTGGCAGAAGATGCTAAATTACAGCTTTCAAAAGATACT
TACGATGATGATTTAGATAATTTATTGGCGCAAATTGGAGATCAA
TATGCTGATTTGTTTTTGGCAGCTAAGAATTTATCAGATGCTATT
TTACTTTCAGATATCCTAAGAGTAAATAGTGAAATAACTAAGGCT
CCCCTATCAGCTTCAATGATTAAGCGCTACGATGAACATCATCAA
GACTTGACTCTTTTAAAAGCTTTAGTTCGACAACAACTTCCAGAA
AAGTATAAAGAAATCTTTTTTGATCAATCAAAAAACGGATATGCA
GGTTATATTGATGGGGGAGCTAGCCAAGAAGAATTTTATAAATTT
ATCAAACCAATTTTAGAAAAAATGGATGGTACTGAGGAATTATTG
GTGAAACTAAATCGTGAAGATTTGCTGCGCAAGCAACGGACCTTT
GACAACGGCTCTATTCCCCATCAAATTCACTTGGGTGAGCTGCAT
GCTATTTTGAGAAGACAAGAAGACTTTTATCCATTTTTAAAAGAC
AATCGTGAGAAGATTGAAAAAATCTTGACTTTTCGAATTCCTTAT
TATGTTGGTCCATTGGCGCGTGGCAATAGTCGTTTTGCATGGATG
ACTCGGAAGTCTGAAGAAACAATTACCCCATGGAATTTTGAAGAA
GTTGTCGATAAAGGTGCTTCAGCTCAATCATTTATTGAACGCATG
ACAAACTTTGATAAAAATCTTCCAAATGAAAAAGTACTACCAAAA
CATAGTTTGCTTTATGAGTATTTTACGGTTTATAACGAATTGACA
AAGGTCAAATATGTTACTGAGGGAATGCGAAAACCAGCATTTCTT
TCAGGTGAACAGAAGAAAGCCATTGTTGATTTACTCTTCAAAACA
AATCGAAAAGTAACCGTTAAGCAATTAAAAGAAGATTATTTCAAA
AAAATAGAATGTTTTGATAGTGTTGAAATTTCAGGAGTTGAAGAT
AGATTTAATGCTTCATTAGGCGCCTACCATGATTTGCTAAAAATT
ATTAAAGATAAAGATTTTTTGGATAATGAAGAAAATGAAGATATC
TTAGAGGATATTGTTTTAACATTGACCTTATTTGAAGATAGGGGG
ATGATTGAGGAAAGACTTAAAACATATGCTCACCTCTTTGATGAT
AAGGTGATGAAACAGCTTAAACGTCGCCGTTATACTGGTTGGGGA
CGTTTGTCTCGAAAATTGATTAATGGTATTAGGGATAAGCAATCT
GGCAAAACAATATTAGATTTTTTGAAATCAGATGGTTTTGCCAAT
CGCAATTTTATGCAGCTGATCCATGATGATAGTTTGACATTTAAA
GAAGATATTCAAAAAGCACAGGTGTCTGGACAAGGCCATAGTTTA
CATGAACAGATTGCTAACTTAGCTGGCAGTCCTGCTATTAAAAAA
GGTATTTTACAGACTGTAAAAATTGTTGATGAACTGGTCAAAGTA
ATGGGGCATAAGCCAGAAAATATCGTTATTGAAATGGCACGTGAA
AATCAGACAACTCAAAAGGGCCAGAAAAATTCGCGAGAGCGTATG
AAACGAATCGAAGAAGGTATCAAAGAATTAGGAAGTCAGATTCTT
AAAGAGCATCCTGTTGAAAATACTCAATTGCAAAATGAAAAGCTC
TATCTCTATTATCTACAAAATGGAAGAGACATGTATGTGGACCAA
GAATTAGATATTAATCGTTTAAGTGATTATGATGTCGATCACATT
GTTCCACAAAGTTTCATTAAAGACGATTCAATAGACAATAAGGTA
CTAACGCGTTCTGATAAAAATCGTGGTAAATCGGATAACGTTCCA
AGTGAAGAAGTAGTCAAAAAGATGAAAAACTATTGGAGACAACTT
CTAAACGCCAAGTTAATCACTCAACGTAAGTTTGATAATTTAACG
AAAGCTGAACGTGGAGGTTTGAGTGAACTTGATAAAGCTGGTTTT
ATCAAACGCCAATTGGTTGAAACTCGCCAAATCACTAAGCATGTG
GCACAAATTTTGGATAGTCGCATGAATACTAAATACGATGAAAAT
GATAAACTTATTCGAGAGGTTAAAGTGATTACCTTAAAATCTAAA
TTAGTTTCTGACTTCCGAAAAGATTTCCAATTCTATAAAGTACGT
GAGATTAACAATTACCATCATGCCCATGATGCGTATCTAAATGCC
GTCGTTGGAACTGCTTTGATTAAGAAATATCCAAAACTTGAATCG
GAGTTTGTCTATGGTGATTATAAAGTTTATGATGTTCGTAAAATG
ATTGCTAAGTCTGAGCAAGAAATAGGCAAAGCAACCGCAAAATAT
TTCTTTTACTCTAATATCATGAACTTCTTCAAAACAGAAATTACA
CTTGCAAATGGAGAGATTCGCAAACGCCCTCTAATCGAAACTAAT
GGGGAAACTGGAGAAATTGTCTGGGATAAAGGGCGAGATTTTGCC
ACAGTGCGCAAAGTATTGTCCATGCCCCAAGTCAATATTGTCAAG
AAAACAGAAGTACAGACAGGCGGATTCTCCAAGGAGTCAATTTTA
CCAAAAAGAAATTCGGACAAGCTTATTGCTCGTAAAAAAGACTGG
GATCCAAAAAAATATGGTGGTTTTGATAGTCCAACGGTAGCTTAT
TCAGTCCTAGTGGTTGCTAAGGTGGAAAAAGGGAAATCGAAGAAG
TTAAAATCCGTTAAAGAGTTACTAGGGATCACAATTATGGAAAGA
AGTTCCTTTGAAAAAAATCCGATTGACTTTTTAGAAGCTAAAGGA
TATAAGGAAGTTAAAAAAGACTTAATCATTAAACTACCTAAATAT
AGTCTTTTTGAGTTAGAAAACGGTCGTAAACGGATGCTGGCTAGT
GCCGGAGAATTACAAAAAGGAAATGAGCTGGCTCTGCCAAGCAAA
TATGTGAATTTTTTATATTTAGCTAGTCATTATGAAAAGTTGAAG
GGTAGTCCAGAAGATAACGAACAAAAACAATTGTTTGTGGAGCAG
CATAAGCATTATTTAGATGAGATTATTGAGCAAATCAGTGAATTT
TCTAAGCGTGTTATTTTAGCAGATGCCAATTTAGATAAAGTTCTT
AGTGCATATAACAAACATAGAGACAAACCAATACGTGAACAAGCA
GAAAATATTATTCATTTATTTACGTTGACGAATCTTGGAGCTCCC
GCTGCTTTTAAATATTTTGATACAACAATTGATCGTAAACGATAT
ACGTCTACAAAAGAAGTTTTAGATGCCACTCTTATCCATCAATCC
ATCACTGGTCTTTATGAAACACGCATTGATTTGAGTCAGCTAGGA
GGTGACTGA
(SEQ ID NO: 4)
MDKKYSIGLDIGTNSVGWAVITDDYKVPSKKFKVLGNTDRHSIKK
NLIGALLEGSGETAEATRLKRTARRRYTRRKNRICYLQEIFSNEM
AKVDDSFFHRLEESFLVEEDKKHERHPIFGNIVDEVAYHEKYPTI
YHLRKKLADSTDKADLRLIYLALAHMIKFRGHFLIEGDLNPDNSD
VDKLFIQLVQIYNQLFEENPINASRVDAKAILSARLSKSRRLENL
IAQLPGEKRNGLFGNLIALSLGLTPNFKSNFDLAEDAKLQLSKDT
YDDDLDNLLAQIGDQYADLFLAAKNLSDAILLSDILRVNSEITKA
PLSASMIKRYDEHHQDLTLLKALVRQQLPEKYKEIFFDQSKNGYA
GYIDGGASQEEFYKFIKPILEKMDGTEELLVKLNREDLLRKQRTF
DNGSIPHQIHLGELHAILRRQEDFYPFLKDNREKIEKILTFRIPY
YVGPLARGNSRFAWMTRKSEETITPWNFEEVVDKGASAQSFIERM
TNFDKNLPNEKVLPKHSLLYEYFTVYNELTKVKYVTEGMRKPAFL
SGEQKKAIVDLLFKTNRKVTVKQLKEDYFKKIECFDSVEISGVED
RFNASLGAYHDLLKIIKDKDFLDNEENEDILEDIVLTLTLFEDRG
MIEERLKTYAHLFDDKVMKQLKRRRYTGWGRLSRKLINGIRDKQS
GKTILDFLKSDGFANRNFMQLIHDDSLTFKEDIQKAQVSGQGHSL
HEQIANLAGSPAIKKGILQTVKIVDELVKVMGHKPENIVIEMARE
NQTTQKGQKNSRERMKRIEEGIKELGSQILKEHPVENTQLQNEKL
YLYYLQNGRDMYVDQELDINRLSDYDVDHIVPQSFIKDDSIDNKV
LTRSDKNRGKSDNVPSEEVVKKMKNYWRQLLNAKLITQRKFDNLT
KAERGGLSELDKAGFIKRQLVETRQITKHVAQILDSRMNTKYDEN
DKLIREVKVITLKSKLVSDFRKDFQFYKVREINNYHHAHDAYLNA
VVGTALIKKYPKLESEFVYGDYKVYDVRKMIAKSEQEIGKATAKY
FFYSNIMNFFKTEITLANGEIRKRPLIETNGETGEIVWDKGRDFA
TVRKVLSMPQVNIVKKTEVQTGGFSKESILPKRNSDKLIARKKDW
DPKKYGGFDSPTVAYSVLVVAKVEKGKSKKLKSVKELLGITIMER
SSFEKNPIDFLEAKGYKEVKKDLIIKLPKYSLFELENGRKRMLAS
AGELQKGNELALPSKYVNFLYLASHYEKLKGSPEDNEQKQLFVEQ
HKHYLDEIIEQISEFSKRVILADANLDKVLSAYNKHRDKPIREQA
ENIIHLFTLTNLGAPAAFKYFDTTIDRKRYTSTKEVLDATLIHQS
ITGLYETRIDLSQLGGD
(single underline: HNH domain;
double underline: RuvC domain)

[0123] In some embodiments, wild type Cas9 corresponds to, or comprises SEQ ID NO: 2 (nucleotide) and/or SEQ ID NO: 5 (amino acid):

(SEQ ID NO: 2)
ATGGATAAAAAGTATTCTATTGGTTTAGACATCGGCACTAATTCC
GTTGGATGGGCTGTCATAACCGATGAATACAAAGTACCTTCAAAG
AAATTTAAGGTGTTGGGGAACACAGACCGTCATTCGATTAAAAAG
AATCTTATCGGTGCCCTCCTATTCGATAGTGGCGAAACGGCAGAG
GCGACTCGCCTGAAACGAACCGCTCGGAGAAGGTATACACGTCGC
AAGAACCGAATATGTTACTTACAAGAAATTTTTAGCAATGAGATG
GCCAAAGTTGACGATTCTTTCTTTCACCGTTTGGAAGAGTCCTTC
CTTGTCGAAGAGGACAAGAAACATGAACGGCACCCCATCTTTGGA
AACATAGTAGATGAGGTGGCATATCATGAAAAGTACCCAACGATT
TATCACCTCAGAAAAAAGCTAGTTGACTCAACTGATAAAGCGGAC
CTGAGGTTAATCTACTTGGCTCTTGCCCATATGATAAAGTTCCGT
GGGCACTTTCTCATTGAGGGTGATCTAAATCCGGACAACTCGGAT
GTCGACAAACTGTTCATCCAGTTAGTACAAACCTATAATCAGTTG
TTTGAAGAGAACCCTATAAATGCAAGTGGCGTGGATGCGAAGGCT
ATTCTTAGCGCCCGCCTCTCTAAATCCCGACGGCTAGAAAACCTG
ATCGCACAATTACCCGGAGAGAAGAAAAATGGGTTGTTCGGTAAC
CTTATAGCGCTCTCACTAGGCCTGACACCAAATTTTAAGTCGAAC
TTCGACTTAGCTGAAGATGCCAAATTGCAGCTTAGTAAGGACACG
TACGATGACGATCTCGACAATCTACTGGCACAAATTGGAGATCAG
TATGCGGACTTATTTTTGGCTGCCAAAAACCTTAGCGATGCAATC
CTCCTATCTGACATACTGAGAGTTAATACTGAGATTACCAAGGCG
CCGTTATCCGCTTCAATGATCAAAAGGTACGATGAACATCACCAA
GACTTGACACTTCTCAAGGCCCTAGTCCGTCAGCAACTGCCTGAG
AAATATAAGGAAATATTCTTTGATCAGTCGAAAAACGGGTACGCA
GGTTATATTGACGGCGGAGCGAGTCAAGAGGAATTCTACAAGTTT
ATCAAACCCATATTAGAGAAGATGGATGGGACGGAAGAGTTGCTT
GTAAAACTCAATCGCGAAGATCTACTGCGAAAGCAGCGGACTTTC
GACAACGGTAGCATTCCACATCAAATCCACTTAGGCGAATTGCAT
GCTATACTTAGAAGGCAGGAGGATTTTTATCCGTTCCTCAAAGAC
AATCGTGAAAAGATTGAGAAAATCCTAACCTTTCGCATACCTTAC
TATGTGGGACCCCTGGCCCGAGGGAACTCTCGGTTCGCATGGATG
ACAAGAAAGTCCGAAGAAACGATTACTCCATGGAATTTTGAGGAA
GTTGTCGATAAAGGTGCGTCAGCTCAATCGTTCATCGAGAGGATG
ACCAACTTTGACAAGAATTTACCGAACGAAAAAGTATTGCCTAAG
CACAGTTTACTTTACGAGTATTTCACAGTGTACAATGAACTCACG
AAAGTTAAGTATGTCACTGAGGGCATGCGTAAACCCGCCTTTCTA
AGCGGAGAACAGAAGAAAGCAATAGTAGATCTGTTATTCAAGACC
AACCGCAAAGTGACAGTTAAGCAATTGAAAGAGGACTACTTTAAG
AAAATTGAATGCTTCGATTCTGTCGAGATCTCCGGGGTAGAAGAT
CGATTTAATGCGTCACTTGGTACGTATCATGACCTCCTAAAGATA
ATTAAAGATAAGGACTTCCTGGATAACGAAGAGAATGAAGATATC
TTAGAAGATATAGTGTTGACTCTTACCCTCTTTGAAGATCGGGAA
ATGATTGAGGAAAGACTAAAAACATACGCTCACCTGTTCGACGAT
AAGGTTATGAAACAGTTAAAGAGGCGTCGCTATACGGGCTGGGGA
CGATTGTCGCGGAAACTTATCAACGGGATAAGAGACAAGCAAAGT
GGTAAAACTATTCTCGATTTTCTAAAGAGCGACGGCTTCGCCAAT
AGGAACTTTATGCAGCTGATCCATGATGACTCTTTAACCTTCAAA
GAGGATATACAAAAGGCACAGGTTTCCGGACAAGGGGACTCATTG
CACGAACATATTGCGAATCTTGCTGGTTCGCCAGCCATCAAAAAG
GGCATACTCCAGACAGTCAAAGTAGTGGATGAGCTAGTTAAGGTC
ATGGGACGTCACAAACCGGAAAACATTGTAATCGAGATGGCACGC
GAAAATCAAACGACTCAGAAGGGGCAAAAAAACAGTCGAGAGCGG
ATGAAGAGAATAGAAGAGGGTATTAAAGAACTGGGCAGCCAGATC
TTAAAGGAGCATCCTGTGGAAAATACCCAATTGCAGAACGAGAAA
CTTTACCTCTATTACCTACAAAATGGAAGGGACATGTATGTTGAT
CAGGAACTGGACATAAACCGTTTATCTGATTACGACGTCGATCAC
ATTGTACCCCAATCCTTTTTGAAGGACGATTCAATCGACAATAAA
GTGCTTACACGCTCGGATAAGAACCGAGGGAAAAGTGACAATGTT
CCAAGCGAGGAAGTCGTAAAGAAAATGAAGAACTATTGGCGGCAG
CTCCTAAATGCGAAACTGATAACGCAAAGAAAGTTCGATAACTTA
ACTAAAGCTGAGAGGGGTGGCTTGTCTGAACTTGACAAGGCCGGA
TTTATTAAACGTCAGCTCGTGGAAACCCGCCAAATCACAAAGCAT
GTTGCACAGATACTAGATTCCCGAATGAATACGAAATACGACGAG
AACGATAAGCTGATTCGGGAAGTCAAAGTAATCACTTTAAAGTCA
AAATTGGTGTCGGACTTCAGAAAGGATTTTCAATTCTATAAAGTT
AGGGAGATAAATAACTACCACCATGCGCACGACGCTTATCTTAAT
GCCGTCGTAGGGACCGCACTCATTAAGAAATACCCGAAGCTAGAA
AGTGAGTTTGTGTATGGTGATTACAAAGTTTATGACGTCCGTAAG
ATGATCGCGAAAAGCGAACAGGAGATAGGCAAGGCTACAGCCAAA
TACTTCTTTTATTCTAACATTATGAATTTCTTTAAGACGGAAATC
ACTCTGGCAAACGGAGAGATACGCAAACGACCTTTAATTGAAACC
AATGGGGAGACAGGTGAAATCGTATGGGATAAGGGCCGGGACTTC
GCGACGGTGAGAAAAGTTTTGTCCATGCCCCAAGTCAACATAGTA
AAGAAAACTGAGGTGCAGACCGGAGGGTTTTCAAAGGAATCGATT
CTTCCAAAAAGGAATAGTGATAAGCTCATCGCTCGTAAAAAGGAC
TGGGACCCGAAAAAGTACGGTGGCTTCGATAGCCCTACAGTTGCC
TATTCTGTCCTAGTAGTGGCAAAAGTTGAGAAGGGAAAATCCAAG
AAACTGAAGTCAGTCAAAGAATTATTGGGGATAACGATTATGGAG
CGCTCGTCTTTTGAAAAGAACCCCATCGACTTCCTTGAGGCGAAA
GGTTACAAGGAAGTAAAAAAGGATCTCATAATTAAACTACCAAAG
TATAGTCTGTTTGAGTTAGAAAATGGCCGAAAACGGATGTTGGCT
AGCGCCGGAGAGCTTCAAAAGGGGAACGAACTCGCACTACCGTCT
AAATACGTGAATTTCCTGTATTTAGCGTCCCATTACGAGAAGTTG
AAAGGTTCACCTGAAGATAACGAACAGAAGCAACTTTTTGTTGAG
CAGCACAAACATTATCTCGACGAAATCATAGAGCAAATTTCGGAA
TTCAGTAAGAGAGTCATCCTAGCTGATGCCAATCTGGACAAAGTA
TTAAGCGCATACAACAAGCACAGGGATAAACCCATACGTGAGCAG
GCGGAAAATATTATCCATTTGTTTACTCTTACCAACCTCGGCGCT
CCAGCCGCATTCAAGTATTTTGACACAACGATAGATCGCAAACGA
TACACTTCTACCAAGGAGGTGCTAGACGCGACACTGATTCACCAA
TCCATCACGGGATTATATGAAACTCGGATAGATTTGTCACAGCTT
GGGGGTGACGGATCCCCCAAGAAGAAGAGGAAAGTCTCGAGCGAC
TACAAAGACCATGACGGTGATTATAAAGATCATGACATCGATTAC
AAGGATGACGATGACAAGGCTGCAGGA
(SEQ ID NO: 5)
MDKKYSIGLAIGTNSVGWAVITDEYKVPSKKFKVLGNTDRHSIKK
NLIGALLFDSGETAEATRLKRTARRRYTRRKNRICYLQEIFSNEM
AKVDDSFFHRLEESFLVEEDKKHERHPIFGNIVDEVAYHEKYPTI
YHLRKKLVDSTDKADLRLIYLALAHMIKFRGHFLIEGDLNPDNSD
VDKLFIQLVQTYNQLFEENPINASGVDAKAILSARLSKSRRLENL
IAQLPGEKKNGLFGNLIALSLGLTPNFKSNFDLAEDAKLQLSKDT
YDDDLDNLLAQIGDQYADLFLAAKNLSDAILLSDILRVNTEITKA
PLSASMIKRYDEHHQDLTLLKALVRQQLPEKYKEIFFDQSKNGYA
GYIDGGASQEEFYKFIKPILEKMDGTEELLVKLNREDLLRKQRTF
DNGSIPHQIHLGELHAILRRQEDFYPFLKDNREKIEKILTFRIPY
YVGPLARGNSRFAWMTRKSEETITPWNFEEVVDKGASAQSFIERM
TNFDKNLPNEKVLPKHSLLYEYFTVYNELTKVKYVTEGMRKPAFL
SGEQKKAIVDLLFKTNRKVTVKQLKEDYFKKIECFDSVEISGVED
RFNASLGTYHDLLKIIKDKDFLDNEENEDILEDIVLTLTLFEDRE
MIEERLKTYAHLFDDKVMKQLKRRRYTGWGRLSRKLINGIRDKQS
GKTILDFLKSDGFANRNFMQLIHDDSLTFKEDIQKAQVSGQGDSL
HEHIANLAGSPAIKKGILQTVKVVDELVKVMGRHKPENIVIEMAR
ENQTTQKGQKNSRERMKRIEEGIKELGSQILKEHPVENTQLQNEK
LYLYYLQNGRDMYVDQELDINRLSDYDVDHIVPQSFLKDDSIDNK
VLTRSDKNRGKSDNVPSEEVVKKMKNYWRQLLNAKLITORKFDNL
TKAERGGLSELDKAGFIKRQLVETROITKHVAQILDSRMNTKYDE
NDKLIREVKVITLKSKLVSDFRKDFQFYKVREINNYHHAHDAYLN
AVVGTALIKKYPKLESEFVYGDYKVYDVRKMIAKSEQEIGKATAK
YFFYSNIMNFFKTEITLANGEIRKRPLIETNGETGEIVWDKGRDF
ATVRKVLSMPQVNIVKKTEVQTGGFSKESILPKRNSDKLIARKKD
WDPKKYGGFDSPTVAYSVLVVAKVEKGKSKKLKSVKELLGITIME
RSSFEKNPIDFLEAKGYKEVKKDLIIKLPKYSLFELENGRKRMLA
SAGELQKGNELALPSKYVNFLYLASHYEKLKGSPEDNEQKQLFVE
QHKHYLDEIIEQISEFSKRVILADANLDKVLSAYNKHRDKPIREQ
AENIIHLFTLTNLGAPAAFKYFDTTIDRKRYTSTKEVLDATLIHQ
SITGLYETRIDLSQLGGD
(single underline: HNH domain;
double underline: RuvC domain)

[0124] In some embodiments, wild type Cas9 corresponds to Cas9 from Streptococcus pyogenes (NCBI Reference Sequence: NC_002737.2, SEQ ID NO: 3 (nucleotide); and Uniport Reference Sequence: Q99ZW2, SEQ ID NO: 6 (amino acid).

(SEQ ID NO: 3)
ATGGATAAGAAATACTCAATAGGCTTAGATATCGGCACAAATAGCGTCGGATGGGCGGT
GATCACTGATGAATATAAGGTTCCGTCTAAAAAGTTCAAGGTTCTGGGAAATACAGACC
GCCACAGTATCAAAAAAAATCTTATAGGGGCTCTTTTATTTGACAGTGGAGAGACAGCG
GAAGCGACTCGTCTCAAACGGACAGCTCGTAGAAGGTATACACGTCGGAAGAATCGTAT
TTGTTATCTACAGGAGATTTTTTCAAATGAGATGGCGAAAGTAGATGATAGTTTCTTTCA
TCGACTTGAAGAGTCTTTTTTGGTGGAAGAAGACAAGAAGCATGAACGTCATCCTATTTT
TGGAAATATAGTAGATGAAGTTGCTTATCATGAGAAATATCCAACTATCTATCATCTGCG
AAAAAAATTGGTAGATTCTACTGATAAAGCGGATTTGCGCTTAATCTATTTGGCCTTAGC
GCATATGATTAAGTTTCGTGGTCATTTTTTGATTGAGGGAGATTTAAATCCTGATAATAGT
GATGTGGACAAACTATTTATCCAGTTGGTACAAACCTACAATCAATTATTTGAAGAAAAC
CCTATTAACGCAAGTGGAGTAGATGCTAAAGCGATTCTTTCTGCACGATTGAGTAAATCA
AGACGATTAGAAAATCTCATTGCTCAGCTCCCCGGTGAGAAGAAAAATGGCTTATTTGG
GAATCTCATTGCTTTGTCATTGGGTTTGACCCCTAATTTTAAATCAAATTTTGATTTGGCA
GAAGATGCTAAATTACAGCTTTCAAAAGATACTTACGATGATGATTTAGATAATTTATTG
GCGCAAATTGGAGATCAATATGCTGATTTGTTTTTGGCAGCTAAGAATTTATCAGATGCT
ATTTTACTTTCAGATATCCTAAGAGTAAATACTGAAATAACTAAGGCTCCCCTATCAGCT
TCAATGATTAAACGCTACGATGAACATCATCAAGACTTGACTCTTTTAAAAGCTTTAGTT
CGACAACAACTTCCAGAAAAGTATAAAGAAATCTTTTTTGATCAATCAAAAAACGGATA
TGCAGGTTATATTGATGGGGGAGCTAGCCAAGAAGAATTTTATAAATTTATCAAACCAAT
TTTAGAAAAAATGGATGGTACTGAGGAATTATTGGTGAAACTAAATCGTGAAGATTTGCT
GCGCAAGCAACGGACCTTTGACAACGGCTCTATTCCCCATCAAATTCACTTGGGTGAGCT
GCATGCTATTTTGAGAAGACAAGAAGACTTTTATCCATTTTTAAAAGACAATCGTGAGAA
GATTGAAAAAATCTTGACTTTTCGAATTCCTTATTATGTTGGTCCATTGGCGCGTGGCAAT
AGTCGTTTTGCATGGATGACTCGGAAGTCTGAAGAAACAATTACCCCATGGAATTTTGAA
GAAGTTGTCGATAAAGGTGCTTCAGCTCAATCATTTATTGAACGCATGACAAACTTTGAT
AAAAATCTTCCAAATGAAAAAGTACTACCAAAACATAGTTTGCTTTATGAGTATTTTACG
GTTTATAACGAATTGACAAAGGTCAAATATGTTACTGAAGGAATGCGAAAACCAGCATT
TCTTTCAGGTGAACAGAAGAAAGCCATTGTTGATTTACTCTTCAAAACAAATCGAAAAGT
AACCGTTAAGCAATTAAAAGAAGATTATTTCAAAAAAATAGAATGTTTTGATAGTGTTGA
AATTTCAGGAGTTGAAGATAGATTTAATGCTTCATTAGGTACCTACCATGATTTGCTAAA
AATTATTAAAGATAAAGATTTTTTGGATAATGAAGAAAATGAAGATATCTTAGAGGATA
TTGTTTTAACATTGACCTTATTTGAAGATAGGGAGATGATTGAGGAAAGACTTAAAACAT
ATGCTCACCTCTTTGATGATAAGGTGATGAAACAGCTTAAACGTCGCCGTTATACTGGTT
GGGGACGTTTGTCTCGAAAATTGATTAATGGTATTAGGGATAAGCAATCTGGCAAAACA
ATATTAGATTTTTTGAAATCAGATGGTTTTGCCAATCGCAATTTTATGCAGCTGATCCATG
ATGATAGTTTGACATTTAAAGAAGACATTCAAAAAGCACAAGTGTCTGGACAAGGCGAT
AGTTTACATGAACATATTGCAAATTTAGCTGGTAGCCCTGCTATTAAAAAAGGTATTTTA
CAGACTGTAAAAGTTGTTGATGAATTGGTCAAAGTAATGGGGCGGCATAAGCCAGAAAA
TATCGTTATTGAAATGGCACGTGAAAATCAGACAACTCAAAAGGGCCAGAAAAATTCGC
GAGAGCGTATGAAACGAATCGAAGAAGGTATCAAAGAATTAGGAAGTCAGATTCTTAAA
GAGCATCCTGTTGAAAATACTCAATTGCAAAATGAAAAGCTCTATCTCTATTATCTCCAA
AATGGAAGAGACATGTATGTGGACCAAGAATTAGATATTAATCGTTTAAGTGATTATGAT
GTCGATCACATTGTTCCACAAAGTTTCCTTAAAGACGATTCAATAGACAATAAGGTCTTA
ACGCGTTCTGATAAAAATCGTGGTAAATCGGATAACGTTCCAAGTGAAGAAGTAGTCAA
AAAGATGAAAAACTATTGGAGACAACTTCTAAACGCCAAGTTAATCACTCAACGTAAGT
TTGATAATTTAACGAAAGCTGAACGTGGAGGTTTGAGTGAACTTGATAAAGCTGGTTTTA
TCAAACGCCAATTGGTTGAAACTCGCCAAATCACTAAGCATGTGGCACAAATTTTGGATA
GTCGCATGAATACTAAATACGATGAAAATGATAAACTTATTCGAGAGGTTAAAGTGATT
ACCTTAAAATCTAAATTAGTTTCTGACTTCCGAAAAGATTTCCAATTCTATAAAGTACGT
GAGATTAACAATTACCATCATGCCCATGATGCGTATCTAAATGCCGTCGTTGGAACTGCT
TTGATTAAGAAATATCCAAAACTTGAATCGGAGTTTGTCTATGGTGATTATAAAGTTTAT
GATGTTCGTAAAATGATTGCTAAGTCTGAGCAAGAAATAGGCAAAGCAACCGCAAAATA
TTTCTTTTACTCTAATATCATGAACTTCTTCAAAACAGAAATTACACTTGCAAATGGAGA
GATTCGCAAACGCCCTCTAATCGAAACTAATGGGGAAACTGGAGAAATTGTCTGGGATA
AAGGGCGAGATTTTGCCACAGTGCGCAAAGTATTGTCCATGCCCCAAGTCAATATTGTCA
AGAAAACAGAAGTACAGACAGGCGGATTCTCCAAGGAGTCAATTTTACCAAAAAGAAAT
TCGGACAAGCTTATTGCTCGTAAAAAAGACTGGGATCCAAAAAAATATGGTGGTTTTGAT
AGTCCAACGGTAGCTTATTCAGTCCTAGTGGTTGCTAAGGTGGAAAAAGGGAAATCGAA
GAAGTTAAAATCCGTTAAAGAGTTACTAGGGATCACAATTATGGAAAGAAGTTCCTTTG
AAAAAAATCCGATTGACTTTTTAGAAGCTAAAGGATATAAGGAAGTTAAAAAAGACTTA
ATCATTAAACTACCTAAATATAGTCTTTTTGAGTTAGAAAACGGTCGTAAACGGATGCTG
GCTAGTGCCGGAGAATTACAAAAAGGAAATGAGCTGGCTCTGCCAAGCAAATATGTGAA
TTTTTTATATTTAGCTAGTCATTATGAAAAGTTGAAGGGTAGTCCAGAAGATAACGAACA
AAAACAATTGTTTGTGGAGCAGCATAAGCATTATTTAGATGAGATTATTGAGCAAATCAG
TGAATTTTCTAAGCGTGTTATTTTAGCAGATGCCAATTTAGATAAAGTTCTTAGTGCATAT
AACAAACATAGAGACAAACCAATACGTGAACAAGCAGAAAATATTATTCATTTATTTAC
GTTGACGAATCTTGGAGCTCCCGCTGCTTTTAAATATTTTGATACAACAATTGATCGTAA
ACGATATACGTCTACAAAAGAAGTTTTAGATGCCACTCTTATCCATCAATCCATCACTGG
TCTTTATGAAACACGCATTGATTTGAGTCAGCTAGGAGGTGACTGA
(SEQ ID NO: 6)
MDKKYSIGLDIGTNSVGWAVITDEYKVPSKKFKVLGNTDRHSIKKNLIGALLEDSGETAEAT
RLKRTARRRYTRRKNRICYLQEIFSNEMAKVDDSFFHRLEESFLVEEDKKHERHPIFGNIVDE
VAYHEKYPTIYHLRKKLVDSTDKADLRLIYLALAHMIKFRGHFLIEGDLNPDNSDVDKLFIQL
VQTYNQLFEENPINASGVDAKAILSARLSKSRRLENLIAQLPGEKKNGLFGNLIALSLGLTPNF
KSNFDLAEDAKLQLSKDTYDDDLDNLLAQIGDQYADLFLAAKNLSDAILLSDILRVNTEITKA
PLSASMIKRYDEHHQDLTLLKALVRQQLPEKYKEIFFDQSKNGYAGYIDGGASQEEFYKFIKP
ILEKMDGTEELLVKLNREDLLRKQRTFDNGSIPHQIHLGELHAILRRQEDFYPFLKDNREKIEK
ILTFRIPYYVGPLARGNSRFAWMTRKSEETITPWNFEEVVDKGASAQSFIERMTNFDKNLPNE
KVLPKHSLLYEYFTVYNELTKVKYVTEGMRKPAFLSGEQKKAIVDLLFKTNRKVTVKQLKE
DYFKKIECFDSVEISGVEDRFNASLGTYHDLLKIIKDKDFLDNEENEDILEDIVLTLTLFEDRE
MIEERLKTYAHLFDDKVMKQLKRRRYTGWGRLSRKLINGIRDKQSGKTILDFLKSDGFANRN
FMQLIHDDSLTFKEDIQKAQVSGQGDSLHEHIANLAGSPAIKKGILQTVKVVDELVKVMGRH
KPENIVIEMARENQTTQKGQKNSRERMKRIEEGIKELGSQILKEHPVENTQLQNEKLYLYYLQ
NGRDMYVDQELDINRLSDYDVDHIVPQSFLKDDSIDNKVLTRSDKNRGKSDNVPSEEVVKK
MKNYWRQLLNAKLITQRKFDNLTKAERGGLSELDKAGFIKRQLVETRQITKHVAQILDSRM
NTKYDENDKLIREVKVITLKSKLVSDFRKDFQFYKVREINNYHHAHDAYLNAVVGTALIKKY
PKLESEFVYGDYKVYDVRKMIAKSEQEIGKATAKYFFYSNIMNFFKTEITLANGEIRKRPLIET
NGETGEIVWDKGRDFATVRKVLSMPQVNIVKKTEVQTGGFSKESILPKRNSDKLIARKKDW
DPKKYGGFDSPTVAYSVLVVAKVEKGKSKKLKSVKELLGITIMERSSFEKNPIDFLEAKGYKE
VKKDLIIKLPKYSLFELENGRKRMLASAGELQKGNELALPSKYVNFLYLASHYEKLKGSPED
NEQKQLFVEQHKHYLDEIIEQISEFSKRVILADANLDKVLSAYNKHRDKPIREQAENIIHLFTL
TNLGAPAAFKYFDTTIDRKRYTSTKEVLDATLIHQSITGLYETRIDLSQLGGD

(single underline: HNH domain; double underline: RuvC domain)

[0125] In some embodiments, Cas9 refers to Cas9 from: Corynebacterium ulcerans (NCBI Refs: NC_015683.1, NC_017317.1); Corynebacterium diphtheria (NCBI Refs: NC_016782.1, NC_016786.1); Spiroplasma syrphidicola (NCBI Ref: NC_021284.1); Prevotella intermedia (NCBI Ref: NC_017861.1); Spiroplasma taiwanense (NCBI Ref: NC_021846.1); Streptococcus iniae (NCBI Ref: NC_021314.1); Belliella baltica (NCBI Ref: NC_018010.1); Psychroflexus torquisI (NCBI Ref: NC_018721.1); Streptococcus thermophilus (NCBI Ref: YP_820832.1), Listeria innocua (NCBI Ref: NP_472073.1), Campylobacter jejuni (NCBI Ref: YP_002344900.1) or Neisseria meningitidis (NCBI Ref: YP_002342100.1) or to a Cas9 from any other organism.

[0126] In some embodiments, dCas9 corresponds to, or comprises in part or in whole, a Cas9 amino acid sequence having one or more mutations that inactivate the Cas9 nuclease activity. For example, in some embodiments, a dCas9 domain comprises D10A and an H840A mutation of SEQ ID NO: 6 or corresponding mutations in another Cas9. In some embodiments, the dCas9 comprises the amino acid sequence of SEQ ID NO: 7 dCas9 (D10A and H840A):

(SEQ ID NO: 7)
MDKKYSIGLAIGTNSVGWAVITDEYKVPSKKFKVLGNTDRHSIKKNLIGALLEDSGETAEAT
RLKRTARRRYTRRKNRICYLQEIFSNEMAKVDDSFFHRLEESFLVEEDKKHERHPIFGNIVDE
VAYHEKYPTIYHLRKKLVDSTDKADLRLIYLALAHMIKFRGHFLIEGDLNPDNSDVDKLFIQL
VQTYNQLFEENPINASGVDAKAILSARLSKSRRLENLIAQLPGEKKNGLFGNLIALSLGLTPNF
KSNFDLAEDAKLQLSKDTYDDDLDNLLAQIGDQYADLFLAAKNLSDAILLSDILRVNTEITKA
PLSASMIKRYDEHHQDLTLLKALVRQQLPEKYKEIFFDQSKNGYAGYIDGGASQEEFYKFIKP
ILEKMDGTEELLVKLNREDLLRKQRTFDNGSIPHQIHLGELHAILRRQEDFYPFLKDNREKIEK
ILTFRIPYYVGPLARGNSRFAWMTRKSEETITPWNFEEVVDKGASAQSFIERMTNFDKNLPNE
KVLPKHSLLYEYFTVYNELTKVKYVTEGMRKPAFLSGEQKKAIVDLLFKTNRKVTVKQLKE
DYFKKIECFDSVEISGVEDRFNASLGTYHDLLKIIKDKDFLDNEENEDILEDIVLTLTLFEDRE
MIEERLKTYAHLFDDKVMKQLKRRRYTGWGRLSRKLINGIRDKQSGKTILDFLKSDGFANRN
FMQLIHDDSLTFKEDIQKAQVSGQGDSLHEHIANLAGSPAIKKGILQTVKVVDELVKVMGRH
KPENIVIEMARENQTTQKGQKNSRERMKRIEEGIKELGSQILKEHPVENTQLQNEKLYLYYLQ
NGRDMYVDQELDINRLSDYDVDAIVPQSFLKDDSIDNKVLTRSDKNRGKSDNVPSEEVVKK
MKNYWRQLLNAKLITQRKFDNLTKAERGGLSELDKAGFIKRQLVETRQITKHVAQILDSRM
NTKYDENDKLIREVKVITLKSKLVSDFRKDFQFYKVREINNYHHAHDAYLNAVVGTALIKKY
PKLESEFVYGDYKVYDVRKMIAKSEQEIGKATAKYFFYSNIMNFFKTEITLANGEIRKRPLIET
NGETGEIVWDKGRDFATVRKVLSMPQVNIVKKTEVQTGGFSKESILPKRNSDKLIARKKDW
DPKKYGGFDSPTVAYSVLVVAKVEKGKSKKLKSVKELLGITIMERSSFEKNPIDFLEAKGYKE
VKKDLIIKLPKYSLFELENGRKRMLASAGELQKGNELALPSKYVNFLYLASHYEKLKGSPED
NEQKQLFVEQHKHYLDEIIEQISEFSKRVILADANLDKVLSAYNKHRDKPIREQAENIIHLFTL
TNLGAPAAFKYFDTTIDRKRYTSTKEVLDATLIHQSITGLYETRIDLSQLGGD

(single underline: HNH domain; double underline: RuvC domain).

[0127] In some embodiments, the Cas9 domain comprises a D10A mutation, while the residue at position 840 remains a histidine in the amino acid sequence provided in SEQ ID NO: 6, or at corresponding positions in another Cas9, such as a Cas9 set forth in any of the amino acid sequences provided in SEQ ID NOs: 4-26. Without wishing to be bound by any particular theory, the presence of the catalytic residue H840 maintains the activity of the Cas9 to cleave the non-edited (e.g., non-deaminated) strand containing a T opposite the targeted A. Restoration of H840 (e.g., from A840 of a dCas9) does not result in the cleavage of the target strand containing the A. Such Cas9 variants are able to generate a single-strand DNA break (nick) at a specific location based on the gRNA-defined target sequence, leading to repair of the non-edited strand, ultimately resulting in a T to C change on the non-edited strand.

[0128] In other embodiments, dCas9 variants having mutations other than D10A and H840A are provided, which, e.g., result in nuclease inactivated Cas9 (dCas9). Such mutations, by way of example, include other amino acid substitutions at D10 and H840, or other substitutions within the nuclease domains of Cas9 (e.g., substitutions in the HNH nuclease subdomain and/or the RuvC1 subdomain). In some embodiments, variants or homologues of dCas9 (e.g., variants of SEQ ID NO: 6, 7, 8, 9, or 22) are provided which are at least about 70% identical, at least about 80% identical, at least about 90% identical, at least about 95% identical, at least about 98% identical, at least about 99% identical, at least about 99.5% identical, or at least about 99.9% identical to SEQ ID NO: 6, 7, 8, 9, or 22. In some embodiments, variants of dCas9 (e.g., variants of SEQ ID NO: 6, 7, 8, 9, or 22) are provided having amino acid sequences which are shorter, or longer than SEQ ID NO: 7, 8, 9, or 22, by about 5 amino acids, by about 10 amino acids, by about 15 amino acids, by about 20 amino acids, by about 25 amino acids, by about 30 amino acids, by about 40 amino acids, by about 50 amino acids, by about 75 amino acids, by about 100 amino acids or more.

[0129] In some embodiments, Cas9 fusion proteins as provided herein comprise the full-length amino acid sequence of a Cas9 protein, e.g., one of the Cas9 sequences provided herein. In other embodiments, however, fusion proteins as provided herein do not comprise a full-length Cas9 sequence, but only a fragment thereof. For example, in some embodiments, a Cas9 fusion protein provided herein comprises a Cas9 fragment, wherein the fragment binds crRNA and tracrRNA or sgRNA, but does not comprise a functional nuclease domain, e.g., in that it comprises only a truncated version of a nuclease domain or no nuclease domain at all.

[0130] Exemplary amino acid sequences of suitable Cas9 domains and Cas9 fragments are provided herein, and additional suitable sequences of Cas9 domains and fragments will be apparent to those of skill in the art.

[0131] In some embodiments, Cas9 refers to Cas9 from: Corynebacterium ulcerans (NCBI Refs: NC_015683.1, NC_017317.1); Corynebacterium diphtheria (NCBI Refs: NC_016782.1, NC_016786.1); Spiroplasma syrphidicola (NCBI Ref: NC_021284.1); Prevotella intermedia (NCBI Ref: NC_017861.1); Spiroplasma taiwanense (NCBI Ref: NC_021846.1); Streptococcus iniae (NCBI Ref: NC_021314.1); Belliella baltica (NCBI Ref: NC_018010.1); Psychroflexus torquisl (NCBI Ref: NC_018721.1); Streptococcus thermophilus (NCBI Ref: YP_820832.1); Listeria innocua (NCBI Ref: NP_472073.1); Campylobacter jejuni (NCBI Ref: YP_002344900.1); or Neisseria meningitidis (NCBI Ref: YP_002342100.1).

[0132] It should be appreciated that additional Cas9 proteins (e.g., a nuclease dead Cas9 (dCas9), a Cas9 nickase (nCas9), or a nuclease active Cas9), including variants and homologs thereof, are within the scope of this disclosure. Exemplary Cas9 proteins include, without limitation, those provided below. In some embodiments, the Cas9 protein is a nuclease dead Cas9 (dCas9). In some embodiments, the dCas9 comprises the amino acid sequence (SEQ ID NO: 7, 8, 9, or 22). In some embodiments, the Cas9 protein is a Cas9 nickase (nCas9). In some embodiments, the nCas9 comprises the amino acid sequence (SEQ ID NO: 10, 13, 16, or 21). In some embodiments, the Cas9 protein is a nuclease active Cas9. In some embodiments, the nuclease active Cas9 comprises the amino acid sequence (SEQ ID NO: 4, 5,6, 11, 12, 14, 15, 16, 17, 18, 19, 20, 23, 24, 25, or 26).

[0133] Exemplary catalytically inactive Cas9 (dCas9):

(SEQ ID NO: 8)
DKKYSIGLAIGTNSVGWAVITDEYKVPSKKFKVLGNTDRHSIKKNLIGALLFDSGETAEATRL
KRTARRRYTRRKNRICYLQEIFSNEMAKVDDSFFHRLEESFLVEEDKKHERHPIFGNIVDEVA
YHEKYPTIYHLRKKLVDSTDKADLRLIYLALAHMIKFRGHFLIEGDLNPDNSDVDKLFIQLVQ
TYNQLFEENPINASGVDAKAILSARLSKSRRLENLIAQLPGEKKNGLFGNLIALSLGLTPNFKS
NFDLAEDAKLQLSKDTYDDDLDNLLAQIGDQYADLFLAAKNLSDAILLSDILRVNTEITKAPL
SASMIKRYDEHHQDLTLLKALVRQQLPEKYKEIFFDQSKNGYAGYIDGGASQEEFYKFIKPIL
EKMDGTEELLVKLNREDLLRKQRTFDNGSIPHQIHLGELHAILRRQEDFYPFLKDNREKIEKIL
TFRIPYYVGPLARGNSRFAWMTRKSEETITPWNFEEVVDKGASAQSFIERMTNFDKNLPNEK
VLPKHSLLYEYFTVYNELTKVKYVTEGMRKPAFLSGEQKKAIVDLLFKTNRKVTVKQLKED
YFKKIECFDSVEISGVEDRFNASLGTYHDLLKIIKDKDFLDNEENEDILEDIVLTLTLFEDREMI
EERLKTYAHLFDDKVMKQLKRRRYTGWGRLSRKLINGIRDKQSGKTILDFLKSDGFANRNF
MQLIHDDSLTFKEDIQKAQVSGQGDSLHEHIANLAGSPAIKKGILQTVKVVDELVKVMGRHK
PENIVIEMARENQTTQKGQKNSRERMKRIEEGIKELGSQILKEHPVENTQLQNEKLYLYYLQN
GRDMYVDQELDINRLSDYDVDAIVPQSFLKDDSIDNKVLTRSDKNRGKSDNVPSEEVVKKM
KNYWRQLLNAKLITQRKFDNLTKAERGGLSELDKAGFIKRQLVETRQITKHVAQILDSRMNT
KYDENDKLIREVKVITLKSKLVSDFRKDFQFYKVREINNYHHAHDAYLNAVVGTALIKKYPK
LESEFVYGDYKVYDVRKMIAKSEQEIGKATAKYFFYSNIMNFFKTEITLANGEIRKRPLIETNG
ETGEIVWDKGRDFATVRKVLSMPQVNIVKKTEVQTGGFSKESILPKRNSDKLIARKKDWDPK
KYGGFDSPTVAYSVLVVAKVEKGKSKKLKSVKELLGITIMERSSFEKNPIDFLEAKGYKEVK
KDLIIKLPKYSLFELENGRKRMLASAGELQKGNELALPSKYVNFLYLASHYEKLKGSPEDNE
QKQLFVEQHKHYLDEIIEQISEFSKRVILADANLDKVLSAYNKHRDKPIREQAENIIHLFTLTN
LGAPAAFKYFDTTIDRKRYTSTKEVLDATLIHQSITGLYETRIDLSQLGGD

[0134] Exemplary Cas9 nickase (nCas9):

(SEQ ID NO: 10)
DKKYSIGLAIGTNSVGWAVITDEYKVPSKKFKVLGNTDRHSIKKNLIGALLFDSGETAEATRL
KRTARRRYTRRKNRICYLQEIFSNEMAKVDDSFFHRLEESFLVEEDKKHERHPIFGNIVDEVA
YHEKYPTIYHLRKKLVDSTDKADLRLIYLALAHMIKFRGHFLIEGDLNPDNSDVDKLFIQLVQ
TYNQLFEENPINSGVDAKAILSARLSKSRRLENLIAQLPGEKKNGLFGNLIALSLGLTPNFKS
NFDLAEDAKLQLSKDTYDDDLDNLLAQIGDQYADLFLAAKNLSDAILLSDILRVNTEITKAPL
SASMIKRYDEHHQDLTLLKALVRQQLPEKYKEIFFDQSKNGYAGYIDGGASQEEFYKFIKPIL
EKMDGTEELLVKLNREDLLRKQRTFDNGSIPHQIHLGELHAILRRQEDFYPFLKDNREKIEKIL
TFRIPYYVGPLARGNSRFAWMTRKSEETITPWNFEEVVDKGASAQSFIERMTNFDKNLPNEK
VLPKHSLLYEYFTVYNELTKVKYVTEGMRKPAFLSGEQKKAIVDLLFKTNRKVTVKQLKED
YFKKIECFDSVEISGVEDRFNASLGTYHDLLKIIKDKDFLDNEENEDILEDIVLTLTLFEDREMI
EERLKTYAHLFDDKVMKQLKRRRYTGWGRLSRKLINGIRDKQSGKTILDFLKSDGFANRNF
MQLIHDDSLTFKEDIQKAQVSGQGDSLHEHIANLAGSPAIKKGILQTVKVVDELVKVMGRHK
PENIVIEMARENQTTQKGQKNSRERMKRIEEGIKELGSQILKEHPVENTQLQNEKLYLYYLQN
GRDMYVDQELDINRLSDYDVDHIVPQSFLKDDSIDNKVLTRSDKNRGKSDNVPSEEVVKKM
KNYWRQLLNAKLITQRKFDNLTKAERGGLSELDKAGFIKRQLVETRQITKHVAQILDSRMNT
KYDENDKLIREVKVITLKSKLVSDFRKDFQFYKVREINNYHHAHDAYLNAVVGTALIKKYPK
LESEFVYGDYKVYDVRKMIAKSEQEIGKATAKYFFYSNIMNFFKTEITLANGEIRKRPLIETNG
ETGEIVWDKGRDFATVRKVLSMPQVNIVKKTEVQTGGFSKESILPKRNSDKLIARKKDWDPK
KYGGFDSPTVAYSVLVVAKVEKGKSKKLKSVKELLGITIMERSSFEKNPIDFLEAKGYKEVK
KDLIIKLPKYSLFELENGRKRMLASAGELQKGNELALPSKYVNFLYLASHYEKLKGSPEDNE
QKQLFVEQHKHYLDEIIEQISEFSKRVILADANLDKVLSAYNKHRDKPIREQAENIIHLFTLTN
LGAPAAFKYFDTTIDRKRYTSTKEVLDATLIHQSITGLYETRIDLSQLGGD

[0135] Exemplary catalytically active Cas9:

(SEQ ID NO: 11)
DKKYSIGLDIGTNSVGWAVITDEYKVPSKKFKVLGNTDRHSIKKNLIGALLFDSGETA
EATRLKRTARRRYTRRKNRICYLQEIFSNEMAKVDDSFFHRLEESFLVEEDKKHERHPIFGNI
VDEVAYHEKYPTIYHLRKKLVDSTDKADLRLIYLALAHMIKFRGHFLIEGDLNPDNSDVDKL
FIQLVQTYNQLFEENPINASGVDAKAILSARLSKSRRLENLIAQLPGEKKNGLFGNLIALSLGL
TPNFKSNFDLAEDAKLQLSKDTYDDDLDNLLAQIGDQYADLFLAAKNLSDAILLSDILRVNT
EITKAPLSASMIKRYDEHHQDLTLLKALVRQQLPEKYKEIFFDQSKNGYAGYIDGGASQEEFY
KFIKPILEKMDGTEELLVKLNREDLLRKQRTFDNGSIPHQIHLGELHAILRRQEDFYPFLKDNR
EKIEKILTFRIPYYVGPLARGNSRFAWMTRKSEETITPWNFEEVVDKGASAQSFIERMTNFDK
NLPNEKVLPKHSLLYEYFTVYNELTKVKYVTEGMRKPAFLSGEQKKAIVDLLFKTNRKVTV
KQLKEDYFKKIECFDSVEISGVEDRFNASLGTYHDLLKIIKDKDFLDNEENEDILEDIVLTLTLF
EDREMIEERLKTYAHLFDDKVMKQLKRRRYTGWGRLSRKLINGIRDKQSGKTILDFLKSDGF
ANRNFMQLIHDDSLTFKEDIQKAQVSGQGDSLHEHIANLAGSPAIKKGILQTVKVVDELVKV
MGRHKPENIVIEMARENQTTQKGQKNSRERMKRIEEGIKELGSQILKEHPVENTQLQNEKLY
LYYLQNGRDMYVDQELDINRLSDYDVDHIVPQSFLKDDSIDNKVLTRSDKNRGKSDNVPSEE
VVKKMKNYWRQLLNAKLITQRKFDNLTKAERGGLSELDKAGFIKRQLVETRQITKHVAQIL
DSRMNTKYDENDKLIREVKVITLKSKLVSDFRKDFQFYKVREINNYHHAHDAYLNAVVGTA
LIKKYPKLESEFVYGDYKVYDVRKMIAKSEQEIGKATAKYFFYSNIMNFFKTEITLANGEIRK
RPLIETNGETGEIVWDKGRDFATVRKVLSMPQVNIVKKTEVQTGGFSKESILPKRNSDKLIAR
KKDWDPKKYGGFDSPTVAYSVLVVAKVEKGKSKKLKSVKELLGITIMERSSFEKNPIDFLEA
KGYKEVKKDLIIKLPKYSLFELENGRKRMLASAGELQKGNELALPSKYVNFLYLASHYEKLK
GSPEDNEQKQLFVEQHKHYLDEIIEQISEFSKRVILADANLDKVLSAYNKHRDKPIREQAENII
HLFTLTNLGAPAAFKYFDTTIDRKRYTSTKEVLDATLIHQSITGLYETRIDLSQLGGD.

[0136] The term “Cas9 nickase,” as used herein, refers to a Cas9 protein that is capable of cleaving only one strand of a duplexed nucleic acid molecule (e.g., a duplexed DNA molecule). In some embodiments, a Cas9 nickase comprises a D10A mutation and has a histidine at position H840 of SEQ ID NO: 6, or a corresponding mutation in any Cas9 provided, such as any one of SEQ ID NOs: 4-26. For example, a Cas9 nickase may comprise the amino acid sequence as set forth in SEQ ID NO: 10, 13, 16, or 21. Such a Cas9 nickase has an active HNH nuclease domain and is able to cleave the non-targeted strand of DNA, i.e., the strand bound by the gRNA. Further, such a Cas9 nickase has an inactive RuvC nuclease domain and is not able to cleave the targeted strand of the DNA, i.e., the strand where base editing is desired.

[0137] In some embodiments, Cas9 refers to a Cas9 from archaea (e.g. nanoarchaea), which constitute a domain and kingdom of single-celled prokaryotic microbes. In some embodiments, Cas9 refers to CasX or CasY, which have been described in, for example, Burstein et al., “New CRISPR-Cas systems from uncultivated microbes.” Cell Res. 2017 Feb. 21. doi: 10.1038/cr.2017.21, the entire contents of which is hereby incorporated by reference. Using genome-resolved metagenomics, a number of CRISPR-Cas systems were identified, including the first reported Cas9 in the archaeal domain of life. This divergent Cas9 protein was found in little-studied nanoarchaea as part of an active CRISPR-Cas system. In bacteria, two previously unknown systems were discovered, CRISPR-CasX and CRISPR-CasY, which are among the most compact systems yet discovered. In some embodiments, Cas9 refers to CasX, or a variant of CasX. In some embodiments, Cas9 refers to a CasY, or a variant of CasY. It should be appreciated that other RNA-guided DNA binding proteins may be used as a nucleic acid programmable DNA binding protein (napDNAbp), and are within the scope of this disclosure.

[0138] In some embodiments, the nucleic acid programmable DNA binding protein (napDNAbp) of any of the fusion proteins provided herein may be a CasX or CasY protein.

[0139] In some embodiments, the napDNAbp is a CasX protein. In some embodiments, the CasX protein is a nuclease inactive CasX protein (dCasX), a CasX nickase (CasXn), or a nuclease active CasX. In some embodiments, the napDNAbp is a CasY protein. In some embodiments, the CasY protein is a nuclease inactive CasY protein (dCasY), a CasY nickase (CasYn), or a nuclease active CasY. In some embodiments, the napDNAbp comprises an amino acid sequence that is at least 85%, at least 90%, at least 91%, at least 92%, at least 93%, at least 94%, at least 95%, at least 96%, at least 97%, at least 98%, at least 99%, or at ease 99.5% identical to a naturally-occurring CasX or CasY protein. In some embodiments, the napDNAbp is a naturally-occurring CasX or CasY protein. In some embodiments, the napDNAbp comprises an amino acid sequence that is at least 85%, at least 90%, at least 91%, at least 92%, at least 93%, at least 94%, at least 95%, at least 96%, at least 97%, at least 98%, at least 99%, or at ease 99.5% identical to any one of SEQ ID NOs: 27-29. In some embodiments, the napDNAbp comprises an amino acid sequence of any one SEQ ID NOs: 27-29. It should be appreciated that CasX and CasY from other bacterial species may also be used in accordance with the present disclosure.

CasX (uniprot.org/uniprot/F0NN87; http://www.uniprot.org/uniprot/F0NH53)
>tr|F0NN87|F0NN87_SULIH CRISPR-associated Casx protein OS = Sulfolobus
islandicus (strain HVE10/4) GN = SiH_0402 PE = 4 SV = 1
(SEQ ID NO: 27)
MEVPLYNIFGDNYIIQVATEAENSTIYNNKVEIDDEELRNVLNLAYKIAKNNEDAAAERRGK
AKKKKGEEGETTTSNIILPLSGNDKNPWTETLKCYNFPTTVALSEVFKNFSQVKECEEVSAPS
FVKPEFYEFGRSPGMVERTRRVKLEVEPHYLIIAAAGWVLTRLGKAKVSEGDYVGVNVFTPT
RGILYSLIQNVNGIVPGIKPETAFGLWIARKVVSSVTNPNVSVVRIYTISDAVGQNPTTINGGFS
IDLTKLLEKRYLLSERLEAIARNALSISSNMRERYIVLANYIYEYLTGSKRLEDLLYFANRDLI
MNLNSDDGKVRDLKLISAYVNGELIRGEG
>tr|F0NH53|F0NH53_SULIR CRISPR associated protein, CasX OS = Sulfolobus
islandicus (strain REY15A) GN = SiRe_0771 PE = 4 SV = 1
(SEQ ID NO: 28)
MEVPLYNIFGDNYIIQVATEAENSTIYNNKVEIDDEELRNVLNLAYKIAKNNEDAAAERRGK
AKKKKGEEGETTTSNIILPLSGNDKNPWTETLKCYNFPTTVALSEVFKNFSQVKECEEVSAPS
FVKPEFYKFGRSPGMVERTRRVKLEVEPHYLIMAAAGWVLTRLGKAKVSEGDYVGVNVFTP
TRGILYSLIQNVNGIVPGIKPETAFGLWIARKVVSSVTNPNVSVVSIYTISDAVGQNPTTINGGF
SIDLTKLLEKRDLLSERLEAIARNALSISSNMRERYIVLANYIYEYLTGSKRLEDLLYFANRDLI
MNLNSDDGKVRDLKLISAYVNGELIRGEG
CasY (ncbi.nlm.nih.gov/protein/APG80656.1)
>APG80656.1 CRISPR-associated protein CasY [uncultured Parcubacteria group
bacterium]
(SEQ ID NO: 29)
MSKRHPRISGVKGYRLHAQRLEYTGKSGAMRTIKYPLYSSPSGGRTVPREIVSAINDDYVGL
YGLSNFDDLYNAEKRNEEKVYSVLDFWYDCVQYGAVESYTAPGLLKNVAEVRGGSYELTK
TLKGSHLYDELQIDKVIKFLNKKEISRANGSLDKLKKDIIDCFKAEYRERHKDQCNKLADDIK
NAKKDAGASLGERQKKLFRDFFGISEQSENDKPSFTNPLNLTCCLLPFDTVNNNRNRGEVLF
NKLKEYAQKLDKNEGSLEMWEYIGIGNSGTAFSNFLGEGFLGRLRENKITELKKAMMDITDA
WRGQEQEEELEKRLRILAALTIKLREPKFDNHWGGYRSDINGKLSSWLQNYINQTVKIKEDL
KGHKKDLKKAKEMINRFGESDTKEEAVVSSLLESIEKIVPDDSADDEKPDIPAIAIYRRFLSDG
RLTLNRFVQREDVQEALIKERLEAEKKKKPKKRKKKSDAEDEKETIDFKELFPHLAKPLKLVP
NFYGDSKRELYKKYKNAAIYTDALWKAVEKIYKSAFSSSLKNSFFDTDFDKDFFIKRLQKIFS
VYRRFNTDKWKPIVKNSFAPYCDIVSLAENEVLYKPKQSRSRKSAAIDKNRVRLPSTENIAKA
GIALARELSVAGFDWKDLLKKEEHEEYIDLIELHKTALALLLAVTETQLDISALDFVENGTVK
DFMKTRDGNLVLEGRFLEMFSQSIVFSELRGLAGLMSRKEFITRSAIQTMNGKQAELLYIPHE
FQSAKITTPKEMSRAFLDLAPAEFATSLEPESLSEKSLLKLKQMRYYPHYFGYELTRTGQGID
GGVAENALRLEKSPVKKREIKCKQYKTLGRGQNKIVLYVRSSYYQTQFLEWFLHRPKNVQT
DVAVSGSFLIDEKKVKTRWNYDALTVALEPVSGSERVFVSQPFTIFPEKSAEEEGQRYLGIDIG
EYGIAYTALEITGDSAKILDQNFISDPQLKTLREEVKGLKLDQRRGTFAMPSTKIARIRESLVH
SLRNRIHHLALKHKAKIVYELEVSRFEEGKQKIKKVYATLKKADVYSEIDADKNLQTTVWG
KLAVASEISASYTSQFCGACKKLWRAEMQVDETITTQELIGTVRVIKGGTLIDAIKDFMRPPIF
DENDTPFPKYRDFCDKHHISKKMRGNSCLFICPFCRANADADIQASQTIALLRYVKEEKKVED
YFERFRKLKNIKVLGQMKKI

[0140] The term “effective amount,” as used herein, refers to an amount of a biologically active agent that is sufficient to elicit a desired biological response. For example, in some embodiments, an effective amount of a nucleobase editor may refer to the amount of the nucleobase editor that is sufficient to induce a mutation of a target site specifically bound by the nucleobase editor. In some embodiments, an effective amount of a fusion protein provided herein, e.g., of a fusion protein comprising a nucleic acid programmable DNA binding protein and a deaminase domain (e.g., a cytidine deaminase domain) may refer to the amount of the fusion protein that is sufficient to induce editing of a target site specifically bound and edited by the fusion protein. As will be appreciated by the skilled artisan, the effective amount of an agent, e.g., a fusion protein, a nucleobase editor, a deaminase, a hybrid protein, a protein dimer, a complex of a protein (or protein dimer) and a polynucleotide, or a polynucleotide, may vary depending on various factors as, for example, on the desired biological response, e.g., on the specific allele, genome, or target site to be edited, on the cell or tissue being targeted, and on the agent being used.

[0141] The terms “nucleic acid” and “nucleic acid molecule,” as used herein, refer to a compound comprising a nucleobase and an acidic moiety, e.g., a nucleoside, a nucleotide, or a polymer of nucleotides. Typically, polymeric nucleic acids, e.g., nucleic acid molecules comprising three or more nucleotides are linear molecules, in which adjacent nucleotides are linked to each other via a phosphodiester linkage. In some embodiments, “nucleic acid” refers to individual nucleic acid residues (e.g. nucleotides and/or nucleosides). In some embodiments, “nucleic acid” refers to an oligonucleotide chain comprising three or more individual nucleotide residues. As used herein, the terms “oligonucleotide” and “polynucleotide” can be used interchangeably to refer to a polymer of nucleotides (e.g., a string of at least three nucleotides). In some embodiments, “nucleic acid” encompasses RNA as well as single and/or double-stranded DNA. Nucleic acids may be naturally occurring, for example, in the context of a genome, a transcript, an mRNA, tRNA, rRNA, siRNA, snRNA, a plasmid, cosmid, chromosome, chromatid, or other naturally occurring nucleic acid molecule. On the other hand, a nucleic acid molecule may be a non-naturally occurring molecule, e.g., a recombinant DNA or RNA, an artificial chromosome, an engineered genome, or fragment thereof, or a synthetic DNA, RNA, DNA/RNA hybrid, or including non-naturally occurring nucleotides or nucleosides. Furthermore, the terms “nucleic acid,” “DNA,” “RNA,” and/or similar terms include nucleic acid analogs, e.g., analogs having other than a phosphodiester backbone. Nucleic acids can be purified from natural sources, produced using recombinant expression systems and optionally purified, chemically synthesized, etc. Where appropriate, e.g., in the case of chemically synthesized molecules, nucleic acids can comprise nucleoside analogs such as analogs having chemically modified bases or sugars, and backbone modifications. A nucleic acid sequence is presented in the 5′ to 3′ direction unless otherwise indicated. In some embodiments, a nucleic acid is or comprises natural nucleosides (e.g. adenosine, thymidine, guanosine, cytidine, uridine, deoxyadenosine, deoxythymidine, deoxyguanosine, and deoxycytidine); nucleoside analogs (e.g., 2-aminoadenosine, 2-thiothymidine, inosine, pyrrolo-pyrimidine, 3-methyl adenosine, 5-methylcytidine, 2-aminoadenosine, C5-bromouridine, C5-fluorouridine, C5-iodouridine, C5-propynyl-uridine, C5-propynyl-cytidine, C5-methylcytidine, 2-aminoadenosine, 7-deazaadenosine, 7-deazaguanosine, 8-oxoadenosine, 8-oxoguanosine, 0(6)-methylguanine, and 2-thiocytidine); chemically modified bases; biologically modified bases (e.g., methylated bases); intercalated bases; modified sugars (e.g., 2′-fluororibose, ribose, 2′-deoxyribose, arabinose, and hexose); and/or modified phosphate groups (e.g., phosphorothioates and 5′-N-phosphoramidite linkages).

[0142] The term “proliferative disease,” as used herein, refers to any disease in which cell or tissue homeostasis is disturbed in that a cell or cell population exhibits an abnormally elevated proliferation rate. Proliferative diseases include hyperproliferative diseases, such as pre-neoplastic hyperplastic conditions and neoplastic diseases. Neoplastic diseases are characterized by an abnormal proliferation of cells and include both benign and malignant neoplasias. Malignant neoplasia is also referred to as cancer.

[0143] The terms “protein,” “peptide,” and “polypeptide” are used interchangeably herein, and refer to a polymer of amino acid residues linked together by peptide (amide) bonds. The terms refer to a protein, peptide, or polypeptide of any size, structure, or function. Typically, a protein, peptide, or polypeptide will be at least three amino acids long. A protein, peptide, or polypeptide may refer to an individual protein or a collection of proteins. One or more of the amino acids in a protein, peptide, or polypeptide may be modified, for example, by the addition of a chemical entity such as a carbohydrate group, a hydroxyl group, a phosphate group, a farnesyl group, an isofarnesyl group, a fatty acid group, a linker for conjugation, functionalization, or other modification, etc. A protein, peptide, or polypeptide may also be a single molecule or may be a multi-molecular complex. A protein, peptide, or polypeptide may be just a fragment of a naturally occurring protein or peptide. A protein, peptide, or polypeptide may be naturally occurring, recombinant, or synthetic, or any combination thereof.

[0144] The term “fusion protein” as used herein refers to a hybrid polypeptide which comprises protein domains from at least two different proteins. One protein may be located at the amino-terminal (N-terminal) portion of the fusion protein or at the carboxy-terminal (C-terminal) protein thus forming an “amino-terminal fusion protein” or a “carboxy-terminal fusion protein,” respectively. As used herein, the term “fusion protein” may be synonymous with the term “base editor”. In exemplary embodiments, the fusion proteins of the disclosure are base editing fusion proteins, or base editors. A protein may comprise different domains, for example, a nucleic acid binding domain (e.g., the gRNA binding domain of Cas9 that directs the binding of the protein to a target site) and a nucleic acid cleavage domain or a catalytic domain of a nucleic-acid editing protein. In some embodiments, a protein comprises a proteinaceous part, e.g., an amino acid sequence constituting a nucleic acid binding domain, and an organic compound, e.g., a compound that can act as a nucleic acid cleavage agent. In some embodiments, a protein is in a complex with, or is in association with, a nucleic acid, e.g., RNA. Any of the proteins provided herein may be produced by any method known in the art. For example, the proteins provided herein may be produced via recombinant protein expression and purification, which is especially suited for fusion proteins comprising a peptide linker. Methods for recombinant protein expression and purification are well known, and include those described by Green and Sambrook, Molecular Cloning: A Laboratory Manual (4^{th} ed., Cold Spring Harbor Laboratory Press, Cold Spring Harbor, N.Y. (2012)), the entire contents of which are incorporated herein by reference.

[0145] The term “RNA-programmable nuclease,” and “RNA-guided nuclease” are used interchangeably herein and refer to a nuclease that forms a complex with (e.g., binds or associates with) one or more RNA(s) that is not a target for cleavage. In some embodiments, an RNA-programmable nuclease, when in a complex with an RNA, may be referred to as a nuclease:RNA complex. Typically, the bound RNA(s) is referred to as a guide RNA (gRNA). gRNAs can exist as a complex of two or more RNAs, or as a single RNA molecule. gRNAs that exist as a single RNA molecule may be referred to as single-guide RNAs (sgRNAs), though “gRNA” is used interchangeably to refer to guide RNAs that exist as either single molecules or as a complex of two or more molecules. Typically, gRNAs that exist as single RNA species comprise two domains: (1) a domain that shares homology to a target nucleic acid (e.g., and directs binding of a Cas9 complex to the target); and (2) a domain that binds a Cas9 protein. In some embodiments, domain (2) corresponds to a sequence known as a tracrRNA, and comprises a stem-loop structure. For example, in some embodiments, domain (2) is identical or homologous to a tracrRNA as provided in Jinek et al., Science 337:816-821(2012), the entire contents of which is incorporated herein by reference. Other examples of gRNAs (e.g., those including domain 2) can be found in International Publication No. WO 2015/035,139, published Mar. 12, 2015, entitled “Switchable Cas9 Nucleases And Uses Thereof,” and International Publication No. WO 2015/035136, published Mar. 12, 2015, entitled “Delivery System For Functional Nucleases,” the entire contents of each are hereby incorporated by reference in their entirety. In some embodiments, a gRNA comprises two or more of domains (1) and (2), and may be referred to as an “extended gRNA.” For example, an extended gRNA will, e.g., bind two or more Cas9 proteins and bind a target nucleic acid at two or more distinct regions, as described herein. The gRNA comprises a nucleotide sequence that complements a target site, which mediates binding of the nuclease/RNA complex to said target site, providing the sequence specificity of the nuclease:RNA complex. In some embodiments, the RNA-programmable nuclease is the (CRISPR-associated system) Cas9 endonuclease, for example, Cas9 (Csn1) from Streptococcus pyogenes (see, e.g., “Complete genome sequence of an M1 strain of Streptococcus pyogenes.” Ferretti J. J., McShan W. M., Ajdic D. J., Savic D. J., Savic G., Lyon K., Primeaux C., Sezate S., Suvorov A. N., Kenton S., Lai H. S., Lin S. P., Qian Y., Jia H. G., Najar F. Z., Ren Q., Zhu H., Song L., White J., Yuan X., Clifton S. W., Roe B. A., McLaughlin R. E., Proc. Natl. Acad. Sci. U.S.A. 98:4658-4663(2001); “CRISPR RNA maturation by trans-encoded small RNA and host factor RNase III.” Deltcheva E., Chylinski K., Sharma C. M., Gonzales K., Chao Y., Pirzada Z. A., Eckert M. R., Vogel J., Charpentier E., Nature 471:602-607(2011); and “A programmable dual-RNA-guided DNA endonuclease in adaptive bacterial immunity.” Jinek M., Chylinski K., Fonfara I., Hauer M., Doudna J. A., Charpentier E. Science 337:816-821(2012), the entire contents of each of which are incorporated herein by reference.

[0146] Because RNA-programmable nucleases (e.g., Cas9) use RNA:DNA hybridization to target DNA cleavage sites, these proteins are able to be targeted, in principle, to any sequence specified by the guide RNA. Methods of using RNA-programmable nucleases, such as Cas9, for site-specific cleavage (e.g., to modify a genome) are known in the art (see e.g., Cong, L. et al., Multiplex genome engineering using CRISPR/Cas systems. Science 339, 819-823 (2013); Mali, P. et al., RNA-guided human genome engineering via Cas9. Science 339, 823-826 (2013); Hwang, W. Y. et al., Efficient genome editing in zebrafish using a CRISPR-Cas system. Nature biotechnology 31, 227-229 (2013); Jinek, M. et al., RNA-programmed genome editing in human cells. eLife 2, e00471 (2013); Dicarlo, J. E. et al., Genome engineering in Saccharomyces cerevisiae using CRISPR-Cas systems. Nucleic acids research (2013); Jiang, W. et al. RNA-guided editing of bacterial genomes using CRISPR-Cas systems. Nature biotechnology 31, 233-239 (2013); the entire contents of each of which are incorporated herein by reference).

[0147] A “nuclear localization signal or sequence” (NLS) is an amino acid sequence that tags, designates, or otherwise marks a protein for import into the cell nucleus by nuclear transport. Typically, this signal consists of one or more short sequences of positively charged lysines or arginines exposed on the protein surface. Different nuclear localized proteins may share the same NLS. An NLS has the opposite function of a nuclear export signal (NES), which targets proteins out of the nucleus. Thus, a single nuclear localization signal can direct the entity with which it is associated to the nucleus of a cell. Such sequences may be of any size and composition, for example, more than 25, 25, 15, 12, 10, 8, 7, 6, 5, or 4 amino acids, but will preferably comprise at least a four to eight amino acid sequence known to function as a nuclear localization signal (NLS).

[0148] The term “host cell,” as used herein, refers to a cell that can host and replicate a vector encoding a base editor, guide RNA, and/or combination thereof, as described herein. In some embodiments, host cells are mammalian cells, such as human cells. Provided herein are methods of transducing and transfecting a host cell, such as a human cell, e.g., a human cell in a subject, with one or more vectors provided herein, such as one or more viral (e.g., rAAV) vectors provided herein.

[0149] It should be appreciated that any of the base editors, guide RNAs, and or combinations thereof, described herein may be introduced into a host cell in any suitable way, either stably or transiently. In some embodiments, a base editor may be transfected into the host cell. In some embodiments, the host cell may be transduced or transfected with a nucleic acid construct that encodes a base editor. For example, a host cell may be transduced (e.g., with a viral particle encoding a base editor) with a nucleic acid that encodes a base editor, or the translated base editor. As an additional example, a host cell may be transfected with a nucleic acid (e.g., a plasmid) that encodes a base editor or the translated base editor. Such transductions or transfections may be stable or transient. In some embodiments, host cells expressing a base editor or containing a base editor may be transduced or transfected with one or more gRNA molecules, for example when the base editor comprises a Cas9 (e.g., nCas9) domain. In some embodiments, a plasmid expressing a base editor may be introduced into host cells through electroporation, transient transfection (e.g., lipofection, such as with Lipofectamine 3000®), stable genome integration (e.g., piggybac), viral transduction, or other methods known to those of skill in the art.

[0150] Also provided herein are host cells for packaging of viral particles. In embodiments where the vector is a viral vector, a suitable host cell is a cell that may be infected by the viral vector, can replicate it, and can package it into viral particles that can infect fresh host cells. A cell can host a viral vector if it supports expression of genes of viral vector, replication of the viral genome, and/or the generation of viral particles. In some embodiments, the host cell is a eukaryotic cell, for example, a yeast cell, an insect cell, or a mammalian cell. The type of host cell, will, of course, depend on the vector employed, and suitable host cell/vector combinations will be readily apparent to those of skill in the art.

[0151] As used herein, the term “intein” refers to auto-processing polypeptide domains found in organisms from all domains of life. An intein (intervening protein) carries out a unique auto-processing event known as protein splicing in which it excises itself out from a larger precursor polypeptide through the cleavage of two peptide bonds and, in the process, ligates the flanking extein (external protein) sequences through the formation of a new peptide bond. This rearrangement occurs post-translationally (or possibly co-translationally), as intein genes are found embedded in frame within other protein-coding genes. Furthermore, intein-mediated protein splicing is spontaneous; it requires no external factor or energy source, only the folding of the intein domain. This process is also known as cis-protein splicing, as opposed to the natural process of trans-protein splicing with “split inteins.”

[0152] Split inteins are a sub-category of inteins. Unlike the more common contiguous inteins, split inteins are transcribed and translated as two separate polypeptides, the N-intein and C-intein, each fused to one extein. Upon translation, the intein fragments spontaneously and non-covalently assemble into the canonical intein structure to carry out protein splicing in trans.

[0153] Inteins and split inteins are the protein equivalent of the self-splicing RNA introns (see Perler et al., Nucleic Acids Res. 22:1125-1127 (1994)), which catalyze their own excision from a precursor protein with the concomitant fusion of the flanking protein sequences, known as exteins (reviewed in Perler et al., Curr. Opin. Chem. Biol. 1:292-299 (1997); Perler, F. B. Cell 92(1):1-4 (1998); Xu et al., EMBO J. 15(19):5146-5153 (1996)).

[0154] As used herein, the term “protein splicing” refers to a process in which an interior region of a precursor protein (an intein) is excised and the flanking regions of the protein (exteins) are ligated to form the mature protein. This natural process has been observed in numerous proteins from both prokaryotes and eukaryotes (Perler, F. B., Xu, M. Q., Paulus, H. Current Opinion in Chemical Biology 1997, 1, 292-299; Perler, F. B. Nucleic Acids Research 1999, 27, 346-347). The intein unit contains the necessary components needed to catalyze protein splicing and often contains an endonuclease domain that participates in intein mobility (Perler, F. B., Davis, E. O., Dean, G. E., Gimble, F. S., Jack, W. E., Neff, N., Noren, C. J., Thomer, J., Belfort, M. Nucleic Acids Research 1994, 22, 1127-1127). The resulting proteins are linked, however, not expressed as separate proteins. Protein splicing may also be conducted in trans with split inteins expressed on separate polypeptides spontaneously combine to form a single intein which then undergoes the protein splicing process to join to separate proteins.

[0155] The elucidation of the mechanism of protein splicing has led to a number of intein-based applications (Comb, et al., U.S. Pat. No. 5,496,714; Comb, et al., U.S. Pat. No. 5,834,247; Camarero and Muir, J. Amer. Chem. Soc., 121:5597-5598 (1999); Chong, et al., Gene, 192:271-281 (1997), Chong, et al., Nucleic Acids Res., 26:5109-5115 (1998); Chong, et al., J. Biol. Chem., 273:10567-10577 (1998); Cotton, et al. J. Am. Chem. Soc., 121:1100-1101 (1999); Evans, et al., J. Biol. Chem., 274:18359-18363 (1999); Evans, et al., J. Biol. Chem., 274:3923-3926 (1999); Evans, et al., Protein Sci., 7:2256-2264 (1998); Evans, et al., J. Biol. Chem., 275:9091-9094 (2000); Iwai and Pluckthun, FEBS Lett. 459:166-172 (1999); Mathys, et al., Gene, 231:1-13 (1999); Mills, et al., Proc. Natl. Acad. Sci. USA 95:3543-3548 (1998); Muir, et al., Proc. Natl. Acad. Sci. USA 95:6705-6710 (1998); Otomo, et al., Biochemistry 38:16040-16044 (1999); Otomo, et al., J. Biolmol. NMR 14:105-114 (1999); Scott, et al., Proc. Natl. Acad. Sci. USA 96:13638-13643 (1999); Severinov and Muir, J. Biol. Chem., 273:16205-16209 (1998); Shingledecker, et al., Gene, 207:187-195 (1998); Southworth, et al., EMBO J. 17:918-926 (1998); Southworth, et al., Biotechniques, 27:110-120 (1999); Wood, et al., Nat. Biotechnol., 17:889-892 (1999); Wu, et al., Proc. Natl. Acad. Sci. USA 95:9226-9231 (1998a); Wu, et al., Biochim Biophys Acta 1387:422-432 (1998b); Xu, et al., Proc. Natl. Acad. Sci. USA 96:388-393 (1999); Yamazaki, et al., J. Am. Chem. Soc., 120:5591-5592 (1998)). Each reference is incorporated herein by reference.

[0156] The term “subject,” as used herein, refers to an individual organism, for example, an individual mammal. In some embodiments, the subject is a human. In some embodiments, the subject is a non-human mammal. In some embodiments, the subject is a non-human primate. In some embodiments, the subject is a rodent. In some embodiments, the subject is a sheep, a goat, cattle, a cat, or a dog. In some embodiments, the subject is a vertebrate, an amphibian, a reptile, a fish, an insect, a fly, or a nematode. In some embodiments, the subject is a research or experimental animal. In some embodiments, the subject is genetically engineered, e.g., a genetically engineered non-human subject. The subject may be of either sex and at any stage of development. In some embodiments, the subject is a domesticated animal. In some embodiments, the subject is a plant.

[0157] The term “target site” refers to a sequence within a nucleic acid molecule that is modified by a base editor, such as a fusion protein comprising a cytidine deaminase, (e.g., a dCas9-cytidine deaminase fusion protein provided herein).

[0158] The term “DNA editing efficiency,” as used herein, refers to the number or proportion of intended base pairs that are edited. For example, if a base editor edits 10% of the base pairs that it is intended to target (e.g., within a cell or within a population of cells), then the base editor can be described as being 10% efficient. Some aspects of editing efficiency embrace the modification (e.g. deamination) of a specific nucleotide within DNA, without generating a large number or percentage of insertions or deletions (i.e., indels). It is generally accepted that editing while generating less than 5% indels (as measured over total target nucleotide substrates) is high editing efficiency. The generation of more than 20% indels is generally accepted as poor or low editing efficiency. Indel formation may be measured by techniques known in the art, including high-throughput screening of sequencing reads.

[0159] The term “off-target editing frequency,” as used herein, refers to the number or proportion of unintended base pairs, e.g. DNA base pairs, that are edited. On-target and off-target editing frequencies may be measured by the methods and assays described herein, further in view of techniques known in the art, including high-throughput sequencing reads. As used herein, high-throughput sequencing involves the hybridization of nucleic acid primers (e.g., DNA primers) with complementarity to nucleic acid (e.g., DNA) regions just upstream or downstream of the target sequence or off-target sequence of interest. Because the DNA target sequence and the Cas9-independent off-target sequences are known a priori in the methods disclosed herein, nucleic acid primers with sufficient complementarity to regions upstream or downstream of the target sequence and Cas9-independent off-target sequences of interest may be designed using techniques known in the art, such as the PhusionU PCR kit (Life Technologies), Phusion HS II kit (Life Technologies), and Illumina MiSeq kit. The number of off-target DNA edits may be measured by techniques known in the art, including high-throughput screening of sequencing reads, EndoV-Seq, GUIDE-Seq, CIRCLE-Seq, and Cas-OFFinder. Since many of the Cas9-dependent off-target sites have high sequence identity to the target site of interest, nucleic acid primers with sufficient complementarity to regions upstream or downstream of the Cas9-dependent off-target site may likewise be designed using techniques and kits known in the art. These kits make use of polymerase chain reaction (PCR) amplification, which produces amplicons as intermediate products. The target and off-target sequences may comprise genomic loci that further comprise protospacers and PAMs. Accordingly, the term “amplicons,” as used herein, may refer to nucleic acid molecules that constitute the aggregates of genomic loci, protospacers and PAMs. High-throughput sequencing techniques used herein may further include Sanger sequencing and Illumina-based next-generation genome sequencing (NGS).

[0160] The term “on-target editing,” as used herein, refers to the introduction of intended modifications (e.g., deaminations) to a nucleotide (e.g., cytosine) in a target sequence, such as using the base editors described herein. The term “off-target DNA editing,” as used herein, refers to the introduction of unintended modifications (e.g. deaminations) to nucleotides (e.g. cytosine) in a sequence outside the canonical base editor binding window (i.e., from one protospacer position to another, typically 2 to 8 nucleotides long). Off-target DNA editing can result from weak or non-specific binding of the gRNA sequence to the target sequence. As used herein, the term “bystander editing” refers to synonymous off-target point mutations at nucleobases that are near (proximate to) the target base and do not change the outcome of the intended editing method.

[0161] As used herein, the terms “purity” and “product purity” of a base editor refer to the percentage of edited sequencing reads (reads in which the target nucleobase has been converted to a different base) in which the intended conversion occurs (e.g., for a cytosine to guanine base editor, in which the target C is edited to a G). See Komor et al., Sci Adv 3 (2017).

[0162] The terms “treatment,” “treat,” and “treating,” refer to a clinical intervention aimed to reverse, alleviate, delay the onset of, or inhibit the progress of a disease or disorder, or one or more symptoms thereof, as described herein. As used herein, the terms “treatment,” “treat,” and “treating” refer to a clinical intervention aimed to reverse, alleviate, delay the onset of, or inhibit the progress of a disease or disorder, or one or more symptoms thereof, as described herein. In some embodiments, treatment may be administered after one or more symptoms have developed and/or after a disease has been diagnosed. In other embodiments, treatment may be administered in the absence of symptoms, e.g., to prevent or delay onset of a symptom or inhibit onset or progression of a disease. For example, treatment may be administered to a susceptible individual prior to the onset of symptoms (e.g., in light of a history of symptoms and/or in light of genetic or other susceptibility factors). Treatment may also be continued after symptoms have resolved, for example, to prevent or delay their recurrence.

[0163] The term “recombinant” as used herein in the context of proteins or nucleic acids refers to proteins or nucleic acids that do not occur in nature, but are the product of human engineering. For example, in some embodiments, a recombinant protein or nucleic acid molecule comprises an amino acid or nucleotide sequence that comprises at least one, at least two, at least three, at least four, at least five, at least six, or at least seven mutations as compared to any naturally occurring sequence.

[0164] As used herein, the term “variant” refers to a protein having characteristics that deviate from what occurs in nature that retains at least one functional, i.e., binding, interaction, or enzymatic ability and/or therapeutic property thereof. A “variant” is at least about 70% identical, at least about 80% identical, at least about 90% identical, at least about 95% identical, at least about 96% identical, at least about 97% identical, at least about 98% identical, at least about 99% identical, at least about 99.5% identical, or at least about 99.9% identical to the wild type protein. For instance, a variant of Cas9 may comprise a Cas9 that has one or more changes in amino acid residues as compared to a wild type Cas9 amino acid sequence. As another example, a variant of a deaminase may comprise a deaminase that has one or more changes in amino acid residues as compared to a wild-type deaminase amino acid sequence, e.g., following ancestral sequence reconstruction of the deaminase. These changes include chemical modifications, including substitutions of different amino acid residues truncations, covalent additions (e.g., of a tag), and any other mutations. The term also encompasses circular permutants, mutants, truncations, or domains of a reference sequence, and which display the same or substantially the same functional activity or activities as the reference sequence. This term also embraces fragments of a wild-type protein.

[0165] The level or degree of which the property is retained may be reduced relative to the wild type protein but is typically the same or similar in kind. Generally, variants are overall very similar, and in many regions, identical to the amino acid sequence of the protein described herein. A skilled artisan will appreciate how to make and use variants that maintain all, or at least some, of a functional ability or property.

[0166] The variant proteins may comprise, or alternatively consist of, an amino acid sequence which is at least 80%, 85%, 90%, 95%, 96%, 97%, 98%, 99%, or 100%, identical to, for example, the amino acid sequence of a wild-type protein, or any protein provided herein.

[0167] By a polypeptide having an amino acid sequence at least, for example, 95% “identical” to a query amino acid sequence, it is intended that the amino acid sequence of the subject polypeptide is identical to the query sequence except that the subject polypeptide sequence may include up to five amino acid alterations per each 100 amino acids of the query amino acid sequence. In other words, to obtain a polypeptide having an amino acid sequence at least 95% identical to a query amino acid sequence, up to 5% of the amino acid residues in the subject sequence may be inserted, deleted, or substituted with another amino acid. These alterations of the reference sequence may occur at the amino- or carboxy-terminal positions of the reference amino acid sequence or anywhere between those terminal positions, interspersed either individually among residues in the reference sequence or in one or more contiguous groups within the reference sequence.

[0168] As a practical matter, whether any particular polypeptide is at least 80%, 85%, 90%, 95%, 96%, 97%, 98%, or 99% identical to, for instance, the amino acid sequence of a protein, can be determined conventionally using known computer programs. A preferred method for determining the best overall match between a query sequence (a sequence of the present invention) and a subject sequence, also referred to as a global sequence alignment, can be determined using the FASTDB computer program based on the algorithm of Brutlag et al. (Comp. App. Biosci. 6:237-245 (1990)). In a sequence alignment the query and subject sequences are either both nucleotide sequences or both amino acid sequences. The result of said global sequence alignment is expressed as percent identity. Preferred parameters used in a FASTDB amino acid alignment are: Matrix=PAM 0, k-tuple=2, Mismatch Penalty=1, Joining Penalty=20, Randomization Group Length=0, Cutoff Score=1, Window Size=sequence length, Gap Penalty=5, Gap Size Penalty=0.05, Window Size=500 or the length of the subject amino acid sequence, whichever is shorter.

[0169] If the subject sequence is shorter than the query sequence due to N- or C-terminal deletions, not because of internal deletions, a manual correction must be made to the results. This is because the FASTDB program does not account for N- and C-terminal truncations of the subject sequence when calculating global percent identity. For subject sequences truncated at the N- and C-termini, relative to the query sequence, the percent identity is corrected by calculating the number of residues of the query sequence that are N- and C-terminal of the subject sequence, which are not matched/aligned with a corresponding subject residue, as a percent of the total bases of the query sequence. Whether a residue is matched/aligned is determined by results of the FASTDB sequence alignment. This percentage is then subtracted from the percent identity, calculated by the above FASTDB program using the specified parameters, to arrive at a final percent identity score. This final percent identity score is what is used for the purposes of the present invention. Only residues to the N- and C-termini of the subject sequence, which are not matched/aligned with the query sequence, are considered for the purposes of manually adjusting the percent identity score. That is, only query residue positions outside the farthest N- and C-terminal residues of the subject sequence.

[0170] The term “vector,” as used herein, refers to a nucleic acid that can be modified to encode a gene of interest and that is able to enter into a host cell and replicate within the host cell, and then transfer a replicated form of the vector into another host cell. Exemplary suitable vectors include viral vectors, such as AAV vectors or bacteriophages and filamentous phage, and conjugative plasmids. Additional suitable vectors will be apparent to those of skill in the art based on the present disclosure.

### DETAILED DESCRIPTION OF INVENTION

[0171] The present disclosure provides for cytosine-to-guanine or “CGBE” (or guanine-to-cytosine or “GCBE”) transversion base editors which comprise a napDNAbp, or more specifically, a napDNAbp (e.g., a dCas9 domain), fused to a nucleobase modification domain and a polymerase domain. The disclosed GGBE base editors are capable of converting a C:G nucleobase pair to a G:C nucleobase pair in a target nucleotide sequence of interest, e.g., a genome of a cell. The disclosed base editors may catalyze the conversion of a target cytosine to a guanine via an excision of the target cytosine nucleobase, which generates an abasic site.

[0172] In addition, the disclosure provides compositions comprising the GGBE base editors as described herein, e.g., fusion proteins comprising a napDNAbp domain, a cytidine deaminase domain, and multiple uracil binding protein (UBP) domains; and one or more guide RNAs, e.g., a single-guide RNA (“sgRNA”). In addition, the instant specification provides for nucleic acid molecules encoding and/or expressing the GGBE base editors as described herein, as well as expression vectors and constructs for expressing the GGBE base editors described herein and/or a gRNA, host cells comprising said nucleic acid molecules and expression vectors and optionally vectors encoding one or more gRNAs, host cells comprising said GGBE base editors and optionally one or more gRNAs, and methods for delivering and/or administering nucleic acid-based embodiments described herein.

[0173] Accordingly, in some embodiments, the disclosure provides fusion proteins that comprise (i) a nucleic acid programmable DNA binding protein (napDNAbp), (ii) a cytidine deaminase domain, (iii) a first uracil binding protein (UBP) domain, and (iv) a DNA repair protein. In some embodiments, the DNA repair protein is selected from a DNA polymerase, an exonuclease, an RNA binding motif protein, an E3 ligase, and a translesion polymerase.

[0174] In some embodiments, the DNA repair protein is a nucleic acid polymerase, such as a DNA polymerase (e.g., a translesion polymerase). In various embodiments, the DNA repair protein is selected from DNA polymerase D1 (POLD1), DNA polymerase D2 (POLD2), and DNA polymerase D3 (POLD3). In some embodiments, the fusion protein comprises (iv) a nucleic acid polymerase domain (NAP).

[0175] In some embodiments, the DNA repair protein is an RNA binding motif protein, such as RNA binding motif protein, X-linked (RBMX). In some embodiments, the DNA repair protein is an exonuclease, such as exonuclease 1 (EX01). In some embodiments, the DNA repair protein is an E3 ligase, such as RAD18 or RFWD3.

[0176] In some embodiments, the DNA repair protein is a protein encoded by a gene selected from DDX1, EXO1, POLD1, POLD2, POLD3, RAD18, RBMX, REV1, RFWD3, TIMELESS, PCNA, POLH, POLK, UBE2I, and UBE2T. In particular embodiments, the DNA repair protein is one of POLD2, RBMX, and EXO1.

[0177] The first UBP domain of any of the disclosed fusion proteins may be a UNG orthologue from Mycobacterium smegmatis (UdgX) protein, or a variant thereof. In some embodiments, the first UBP domain has an amino acid sequence that is at least 80%, 85%, 90%, 95%, 98%, or 99% identical to the amino acid sequence of SEQ ID NO: 49, or has an amino acid sequence identical to SEQ ID NO: 49. In some embodiments, the first UBP domain comprises the amino acid sequence of SEQ ID NO: 50 (UdgX*).

[0178] In some embodiments, these disclosed CGBEs further comprise a second DNA repair protein. The second DNA repair protein may be selected from POLD2, RBMX, and EX01. In some embodiments, the first DNA repair protein is a POLD2, and the second DNA repair protein is an RBMX.

[0179] In some aspects, the disclosed CGBE fusion proteins may comprise (i) a nucleic acid programmable DNA binding protein (napDNAbp) domain, (ii) a cytidine deaminase domain, (iii) a first UBP domain, and (iv) a second UBP domain. These fusion proteins may further comprise a third UBP domain. In various embodiments, at least one of the first, second, and third UBP domains is a UdgX protein, or a variant thereof. In some embodiments, each of the first and second, and/or third, UBP domain is a UdgX protein. In some embodiments, any of the first, second, and third UBP domains has an amino acid sequence that is at least 80%, 85%, 90%, 95%, 98%, or 99% identical to the amino acid sequence of SEQ ID NO: 49, or has an amino acid sequence identical to SEQ ID NO: 49. In some aspects, the disclosed CGBE fusion proteins comprise (i) a napDNAbp domain, (ii) a cytidine deaminase domain, (iii) a first UBP domain, (iv) a second UBP domain, and (v) a DNA repair protein.

[0180] The cytidine deaminase domain of any of the disclosed CGBEs may be selected from an APOBEC family deaminase, or a variant thereof. For instance, the deaminase may comprise rAPOBEC1 or a variant thereof (e.g., the EE double mutant variant of rAPOBEC1 or the ancestrally reconstructed rAPOBEC1 variant, Anc689); or human APOBEC3A or a variant thereof (e.g., evolved human APOBEC3A-T31A (eA3aA-T31A)). In some embodiments, the napDNAbp domain is a Cas9 domain, such as a S. pyogenes Cas9 nickase (SpCas9n) domain. In some embodiments, the napDNAbp domain is a high fidelity SpCas9 nickase, such as HF-nCas9 or HF-nCas9-NG.

[0181] In particular embodiments, the CGBEs the fusion protein comprises the structure:
[0182] [UdgX]-[Anc689 deaminase]-[UdgX]-[nCas9 domain];
[0183] [UdgX]-[Anc689 deaminase]-[UdgX]-[nCas9 domain]-[RBMX];
[0184] [UdgX]-[EE deaminase]-[UdgX]-[nCas9 domain]-[UdgX];
[0185] [UdgX]-[rAPOBEC1 deaminase]-[UdgX]-[HF-nCas9 domain];
[0186] [UdgX]-[rAPOBEC1 deaminase]-[UdgX]-[HF-nCas9 domain]-[UdgX];
[0187] [RBMX]-[eA3A deaminase]-[UdgX]-[nCas9 domain];
[0188] [RBMX]-[eA3A deaminase]-[UdgX]-[HF-nCas9 domain];
[0189] [POLD2]-[rAPOBEC1 deaminase]-[UdgX]-[nCas9 domain];
[0190] [POLD2]-[rAPOBEC1 deaminase]-[UdgX]-[nCas9 domain]-[UdgX];
[0191] [POLD2]-[rAPOBEC1 deaminase]-[UdgX]-[nCas9 domain]-[RBMX];
[0192] [EXO1]-[rAPOBEC1 deaminase]-[UdgX]-[nCas9 domain];
[0193] [UdgX]-[Anc689 deaminase]-[UdgX]-[nCas9-NG domain]-[RBMX];
[0194] [UdgX]-[rAPOBEC1 deaminase]-[UdgX]-[nCas9-NG domain]; and
[0195] [UdgX]-[rAPOBEC1 deaminase]-[UdgX]-[HF-nCas9-NG domain],
   wherein each instance of “]-[” comprises an optional linker.

[0196] In particular embodiments, the fusion protein comprises the structure: [POLD2]-[rAPOBEC1 deaminase]-[UdgX]-[nCas9 domain]-[UdgX]; [UdgX]-[EE deaminase]-[UdgX]-[nCas9 domain]-[UdgX]; or [UdgX]-[Anc689 deaminase]-[UdgX]-[nCas9 domain]-[RBMX].

[0197] In some aspects, the present disclosure provides for methods of generating the transversion base editors and methods of using the disclosed transversion base editors or nucleic acid molecules encoding the transversion base editors in applications including editing a nucleic acid molecule, e.g., a genome. The specification provides methods for e editing a target nucleic acid molecule, e.g., a single nucleotide within a genome, with a base editing system described herein (e.g., in the form of a base editor as described herein, or a vector or construct encoding a base editor). Such methods involve transducing (e.g., via transfection) cells with a plurality of complexes each comprising a base editor (e.g., a fusion protein comprising a Cas9 nickase (nCas9) domain, a cytidine deaminase domain, and first and second UBP domains) and optionally a gRNA molecule. In some embodiments, the gRNA is bound to the napDNAbp domain (e.g., dCas9 domain) of the fusion protein. In certain embodiments, the methods involve the transfection of nucleic acid constructs (e.g., plasmids) that each (or together) encode the components of a complex of a base editor and/or gRNA.

[0198] In certain embodiments, the disclosed methods comprise contacting a double-stranded DNA sequence with a complex comprising a fusion protein disclosed herein and a guide RNA, wherein the double-stranded DNA comprises a target C:G nucleobase pair; thereby substituting the cytosine (C) of the C:G pair with a guanine. The disclosed methods may alternatively result in substitution of the guanine (G) of the C:G pair with a guanine derivative; such that the cell thereby subsequently substitutes the guanine derivative with a thymine during a subsequent round of replication.

[0199] In certain embodiments, the methods described herein further comprise cutting (or nicking) one strand of the double-stranded DNA, for example, the strand that includes the guanine (G) of the target C:G nucleobase pair opposite the strand containing the target cytosine (C) that is being mutated. This nicking step serves to direct mismatch repair machinery to the non-edited strand, ensuring that the modified nucleotide is not interpreted as a lesion by the cell's machinery. This nick may be created by the use of an nCas9.

[0200] The target nucleotide sequence may comprise a target sequence (e.g., a point mutation) associated with a disease, disorder, or condition, such as Ehlers-Danlos syndrome, Sotos syndrome, Cornelia de Lange syndrome, or a cancer. The target sequence may comprise a G to C point mutation associated with a disease, disorder, or condition, and wherein the excision and exchange of the mutant C base results in mismatch repair-mediated correction to a sequence that is not associated with a disease, disorder, or condition. Alternatively, the target sequence may comprise a C to G point mutation associated with a disease, disorder, or condition, and wherein the CGBE-mediated excision and exchange of the C base that is paired with the mutant G base results in mismatch repair-mediated correction to a sequence that is not associated with a disease, disorder, or condition.

[0201] The target sequence can encode a protein, and where the point mutation is in a codon and results in a change in the amino acid encoded by the mutant codon as compared to a wild-type codon. The target sequence may also be at a splice site, and the point mutation results in a change in the splicing of an mRNA transcript as compared to the wild-type transcript. In addition, the target may be at a non-coding sequence of a gene, such as a gene promoter or gene repressor, and the point mutation results in increased or decreased expression of the gene.

[0202] Exemplary target genes include the COL3A1 gene, the BRCA2 gene, the NSD1 gene, or the NIPBL gene. It will be appreciated that additional target genes for use in the disclosed methods include any human genes for which an oncogenic phenotype is frequently caused by G:C to C:G point mutations. COL3A1 is associated with Ehlers-Danlos syndrome; BRCA2 is associated with familial breast and ovarian cancer; NSD1 is associated with Sotos syndrome; and NIPBL is associated with Cornelia de Lange syndrome. Additional exemplary target sequences include the CTNBB1 gene, which is associated with cancer, and the DIS3L2 gene, which is associated with Perlmen syndrome. For some of these target genes, G:C to C:G point mutations introduce premature stop codons (UAA, UAG, UGA), resulting in nonsense mutations in protein coding regions. For all of the genetic disorders associated with the point mutations in these target genes, morbidity is high, and current treatment is not curative. Exemplary CGBEs disclosed herein correct these disease alleles in somatic cells, reducing or removing morbidity. In other embodiments, exemplary CGBEs disclosed herein may install disease-suppressing alleles in somatic cells.

[0203] Thus, in some aspects, the conversion of a mutant C results in correction of the nonsense mutation and restoration of the wild-type codon, which may result in the expression of a full-length, wild-type peptide sequence. For instance, the application of the base editors to target genetic sequences may induce a change in the mRNA transcript, such as restoring the mRNA transcript to a wild-type state.

[0204] The methods described herein may involve contacting a base editor with a target nucleotide sequence in vitro, ex vivo, or in vivo. In certain embodiments, this step of contacting occurs in a subject. In certain embodiments, the subject has been diagnosed with a disease, disorder, or condition, such as, but not limited to, a disease, disorder, or condition associated with a point mutation in the COL3A1 gene, the BRCA2 gene, the NSD1 gene, or the NIPBL gene.

[0205] In another aspect, the specification discloses a pharmaceutical composition comprising any one of the presently disclosed base editors (or fusion proteins). In one aspect, the specification discloses a pharmaceutical composition comprising any one of the presently disclosed complexes of fusion proteins and gRNA. In one aspect, the specification discloses a pharmaceutical composition comprising polynucleotides encoding the fusion proteins disclosed herein and polynucleotides encoding a gRNA, or polynucleotides encoding both. In another aspect, the specification discloses a pharmaceutical composition comprising any one of the presently disclosed vectors.

[0206] In some aspects, the disclosure provides base editors comprising one or more adenosine deaminase variants disclosed herein and a napDNAbp domain.

[0207] In some embodiments, the napDNAbp domain comprises a Cas homolog. The napDNAbp domain may be selected from a Cas9, a Cas9n, a dCas9, a CasX, a CasY, a C2c1, a C2c2, a C2c3, a GeoCas9, a CjCas9, a Cas12a, a Cas12b, a Cas12g, a Cas12h, a Cas12i, a Cas13a, a Cas13b, a Cas13c, a Cas13d, a Cas14, a Csn2, an xCas9, an SpCas9-NG, an SpCas9-NG-CP1041, an SpCas9-NG-VRQR, a high-fidelity Cas9 (HFCas9), a HF-nCas9, a HypaCas9, a HF-nCas9-NG, a Sniper-nCas9, an HF-Hypa-nCas9, an e-Cas9, an e-nCas9, an e-HF-Hypa-nCas9, an e-Hypa-Cas9, an e-Hypa-nCas9, an e-HF-nCas9, an LbCas12a, an AsCas12a, a Cas9-KKH, a circularly permuted Cas9, an Argonaute (Ago) domain, a SmacCas9, a Spy-macCas9, an SpCas9-VRQR, an SpCas9-NRRH, an SpaCas9-NRTH, an SpCas9-NRCH. In certain embodiments, the napDNAbp domain comprises or is a Cas9 domain or a Cas12a domain derived from S. pyogenes or S. aureus.

[0208] In some embodiments, the napDNAbp domain is derived from S. pyogenes and is selected from an nCas9, an nCas9-NG, an HF-Cas9, a HypaCas9, a HF-nCas9, a HF-nCas9-NG, an HF-Hypa-nCas9, an e-HF-Hypa-nCas9, and an e-HypaCas9. In particular embodiments, the napDNAbp domain is a HypaCas9, a HF-nCas9-NG, an HF-Hypa-nCas9, or an e-HF-HypanCas9.

[0209] It will be appreciated that all of of these disclosed Cas9 variants for use in the napDNAbp domains of the provided CGBEs can be engineered to have nickase activity (e.g., to contain a D10A substitution) or can be engineered to be nuclease-inactive (e.g., to contain D10A and H840A substitutions). It will be appreciated that these substitutions may be made in the wild-type Cas9 sequence of SEQ ID NO: 6, or at corresponding positions in any homologous Cas protein.

[0210] In some embodiments, the napDNAbp domain comprises a nuclease dead Cas9 (dCas9) domain, a Cas9 nickase (nCas9) domain, or a nuclease active Cas9 domain.

[0211] Further provided herein are methods of contacting any of the disclosed base editors with a nucleic acid molecule, e.g., a nucleic acid molecule (e.g., DNA) comprising a target sequence. In some embodiments of the disclosed methods, low off-target DNA and/or RNA editing effects are observed. In some embodiments, the nucleic acid molecule comprises a DNA, e.g., a single-stranded DNA or a double-stranded DNA. The target sequence of the nucleic acid molecule may comprise a target nucleobase pair containing a cytosine (C). The target sequence may be comprised within a genome, e.g., a human genome. The target sequence may comprise a sequence, e.g., a target sequence with point mutation, associated with a disease or disorder. The target sequence with a point mutation may be associated with Ehlers-Danlos syndrome, Sotos syndrome, Cornelia de Lange syndrome, or a cancer. In some embodiments, this editor may be used to target and revert single nucleotide polymorphisms (SNPs) in disease-relevant genes, which require C to G reversion.

[0212] In some aspects, the disclosure provides complexes comprising the CGBEs as described herein and one or more guide RNAs, e.g., a single-guide RNA (“sgRNA”), as well as compositions comprising any of these complexes. In addition, the present disclosure provides for nucleic acid molecules encoding and/or expressing the base editors as described herein, as well as expression vectors and constructs for expressing the base editors described herein and/or a gRNA (e.g., AAV vectors), host cells comprising any of said nucleic acid molecules and expression vectors and optionally vectors encoding one or more gRNAs, host cells comprising any of said base editors and optionally one or more gRNAs, and methods for delivering and/or administering nucleic acid-based embodiments described herein. In particular, the disclosure provides improved methods of delivery of the disclosed base editors, e.g., to a subject. Delivery of the disclosed base editors as RNPs, rather than DNA plasmids, typically increases on-target:off-target DNA editing ratios. Delivery of the disclosed CGBEs as mRNA molecules (e.g., using electroporation) may increases editing efficiencies.

[0213] Still further, the present disclosure provides for methods of creating the base editors described herein, as well as methods of using the base editors or nucleic acid molecules encoding any of these base editors in applications including editing a nucleic acid molecule, e.g., a genome. In certain embodiments, methods of engineering the base editors (or fusion proteins) provided herein involve a yeast system that may be utilized to evolve one or more components of a base editor (e.g., a polymerase domain). In certain embodiments, following the successful evolution of one or more components of the base editor (e.g., a polymerase domain), methods of making the base editors comprise recombinant protein expression methodologies and techniques known to those of skill in the art.

[0214] In some embodiments, the presently disclosed fusion proteins do not consist (or do not consist essentially of) a napDNAbp domain, a deaminase domain, and a single uracil binding protein. In some embodiments, the presently disclosed fusion proteins do not consist (or do not consist essentially of) a napDNAbp domain, a deaminase domain, a single uracil binding protein, and a nucleic acid polymerase (NAP) domain. In some embodiments, the presently disclosed fusion proteins do not consist (or do not consist essentially of) a napDNAbp domain, a deaminase domain, a single uracil binding protein, and a base exicision enzyme (BEE) domain. In some embodiments, the presently disclosed fusion proteins do not contain a base excision repair inhibitor. In some embodiments, the presently disclosed fusion proteins do not contain a mismatch repair protein.

Nucleic Acid Programmable DNA Binding Proteins (napDNAbp)

[0215] The base editors described herein comprise a nucleic acid programmable DNA binding (napDNAbp) domain. The napDNAbp is associated with at least one guide nucleic acid (e.g., guide RNA), which localizes the napDNAbp to a DNA sequence that comprises a DNA strand (i.e., a target strand) that is complementary to the guide nucleic acid, or a portion thereof (e.g., the protospacer of a guide RNA). In other words, the guide nucleic-acid “programs” the napDNAbp domain to localize and bind to a complementary sequence of the target strand. Binding of the napDNAbp domain to a complementary sequence enables the nucleobase modification domain (i.e., the cytidine deaminase domain) of the base editor to access and enzymatically deaminate a target cytosine base in the target strand.

[0216] The napDNAbp can be a CRISPR (clustered regularly interspaced short palindromic repeat)-associated nuclease. As outlined above, CRISPR is an adaptive immune system that provides protection against mobile genetic elements (viruses, transposable elements and conjugative plasmids). CRISPR clusters contain spacers, sequences complementary to antecedent mobile elements, and target invading nucleic acids. CRISPR clusters are transcribed and processed into CRISPR RNA (crRNA). In type II CRISPR systems correct processing of pre-crRNA requires a trans-encoded small RNA (tracrRNA), endogenous ribonuclease 3 (rnc) and a Cas9 protein. The tracrRNA serves as a guide for ribonuclease 3-aided processing of pre-crRNA. Subsequently, Cas9/crRNA/tracrRNA endonucleolytically cleaves linear or circular dsDNA target complementary to the spacer. The target strand not complementary to crRNA is first cut endonucleolytically, then trimmed 3′-5′ exonucleolytically. In nature, DNA-binding and cleavage typically requires protein and both RNAs. However, single guide RNAs (“sgRNA”, or simply “gNRA”) can be engineered so as to incorporate aspects of both the crRNA and tracrRNA into a single RNA species. See, e.g., Jinek et al., Science 337:816-821(2012), the entire contents of which is hereby incorporated by reference.

[0217] Without wishing to be bound by any particular theory, the binding mechanism of a napDNAbp-guide RNA complex, in general, includes the step of forming an R-loop whereby the napDNAbp induces the unwinding of a double-strand DNA target, thereby separating the strands in the region bound by the napDNAbp. The guideRNA protospacer then hybridizes to the “target strand.” This displaces a “non-target strand” that is complementary to the target strand, which forms the single strand region of the R-loop. In some embodiments, the napDNAbp includes one or more nuclease activities, which cuts the DNA leaving various types of lesions (e.g., a nick in one strand of the DNA). For example, the napDNAbp may comprises a nuclease activity that cuts the non-target strand at a first location, and/or cuts the target strand at a second location. Depending on the nuclease activity, the target DNA can be cut to form a “double-stranded break” whereby both strands are cut. In other embodiments, the target DNA can be cut at only a single site, i.e., the DNA is “nicked” on one strand.

[0218] The below description of various napDNAbps which can be used in connection with the disclosed cytidine deaminases and other fusion protein domains is not meant to be limiting in any way. The disclosed base editors may comprise the canonical SpCas9, or any ortholog Cas9 protein, or any variant Cas9 protein-including any naturally occurring variant, mutant, or otherwise engineered version of Cas9-that is known or which can be made or evolved through a directed evolutionary or otherwise mutagenic process. In various embodiments, the napDNAbp has a nickase activity, i.e., only cleave one strand of the target DNA sequence. In other embodiments, the napDNAbp has an inactive nuclease, e.g., are “dead” proteins. Other variant Cas9 proteins that may be used are those having a smaller molecular weight than the canonical SpCas9 (e.g., for easier delivery) or having modified or rearranged primary amino acid sequence (e.g., the circular permutant forms). The base editors described herein may also comprise Cas9 equivalents, including Cas12a/Cpf1 and Cas12b proteins. The napDNAbps used herein (e.g., SpCas9, SaCas9, or SaCas9 variant or SpCas9 variant) may also may also contain various modifications that alter/enhance their PAM specifies. The disclosure contemplates any Cas9, Cas9 variant, or Cas9 equivalent which has at least 70%, at least 75%, at least 80%, at least 85%, at least 90%, at least 91%, at least 92%, at least 93%, at least 94%, at least 95%, at least 96%, at least 97%, at least 98%, at least 99%, or at least 99.9% sequence identity to a reference Cas9 sequence, such as a reference SpCas9 canonical sequence (set forth in SEQ ID NO: 326), a reference SaCas9 canonical sequence (set forth in SEQ ID NO: 377) or a reference Cas9 equivalent (e.g., Cas12a/Cpf1).

[0219] In some embodiments, the napDNAbp directs cleavage of one or both strands at the location of a target sequence, such as within the target sequence and/or within the complement of the target sequence. In some embodiments, the napDNAbp directs cleavage of one or both strands within about 1, 2, 3, 4, 5, 6, 7, 8, 9, 10, 15, 20, 25, 50, 100, 200, 500, or more base pairs from the first or last nucleotide of a target sequence. For example, an aspartate-to-alanine substitution (D10A) in the RuvC I catalytic domain of Cas9 from S. pyogenes converts Cas9 from a nuclease that cleaves both strands to a nickase (cleaves a single strand). Other examples of mutations that render Cas9 a nickase include, without limitation, H840A, N854A, and N863A in reference to the canonical SpCas9 sequence, or to equivalent amino acid positions in other Cas9 variants or Cas9 equivalents.

[0220] In some embodiments, the napDNAbp domain may comprise more than one napDNAbp protein. Accordingly, in some embodiments, any of the disclosed base editors may contain a first napDNAbp domain and a second napDNAbp domain. In some embodiments, the napDNAbp domain (or the first and second napDNAbp domain, respectively) comprises a first Cas homolog or variant and a second Cas homolog or variant (e.g., the first Cas comprises a Cas9, and the second Cas variant comprises a SpCas9-VRQR).

[0221] As used herein, the term “Cas protein” refers to a full-length Cas protein obtained from nature, a recombinant Cas protein having a sequences that differs from a naturally occurring Cas protein, or any fragment of a Cas protein that nevertheless retains all or a significant amount of the requisite basic functions needed for the disclosed methods, i.e., (i) possession of nucleic-acid programmable binding of the Cas protein to a target DNA, and (ii) ability to nick the target DNA sequence on one strand. The Cas proteins contemplated herein embrace CRISPR Cas9 proteins, as well as Cas9 equivalents, variants (e.g., Cas9 nickase (nCas9) or nuclease inactive Cas9 (dCas9)) homologs, orthologs, or paralogs, whether naturally occurring or non-naturally occurring (e.g., engineered or recombinant), and may include a Cas9 equivalent from any type of CRISPR system (e.g., type II, V, VI), including Cpf1 (a type-V CRISPR-Cas systems), C2c1 (a type V CRISPR-Cas system), C2c2 (a type VI CRISPR-Cas system) and C2c3 (a type V CRISPR-Cas system). Further Cas-equivalents are described in Makarova et al., “C2c2 is a single-component programmable RNA-guided RNA-targeting CRISPR effector,” Science 2016; 353(6299), the contents of which are incorporated herein by reference.

[0222] The term “Cas9” or “Cas9 domain” embraces any naturally occurring Cas9 from any organism, any naturally-occurring Cas9 equivalent or functional fragment thereof, any Cas9 homolog, ortholog, or paralog from any organism, and any mutant or variant of a Cas9, naturally-occurring or engineered. The term Cas9 is not meant to be particularly limiting and may be referred to as a “Cas9 or equivalent.” Exemplary Cas9 proteins are further described herein and/or are described in the art and are incorporated herein by reference. The present disclosure is unlimited with regard to the particular napDNAbp that is employed in the base editors of the disclosure.

[0223] Additional Cas9 sequences and structures are well known to those of skill in the art (see, e.g., “Complete genome sequence of an M1 strain of Streptococcus pyogenes.” Ferretti et al., Proc. Natl. Acad. Sci. U.S.A. 98:4658-4663(2001); “CRISPR RNA maturation by trans-encoded small RNA and host factor RNase III.” Deltcheva E., et al., Nature 471:602-607(2011); and “A programmable dual-RNA-guided DNA endonuclease in adaptive bacterial immunity.” Jinek M. et al., Science 337:816-821(2012), the entire contents of each of which are incorporated herein by reference), and also provided below.

[0224] Examples of Cas9 and Cas9 equivalents are provided; however, these specific examples are not meant to be limiting. The base editors of the present disclosure may use any suitable napDNAbp, including any suitable Cas9 or Cas9 equivalent.

[0225] Also useful in the present compositions and methods are nuclease-inactive Cpf1 (dCpf1) variants that may be used as a guide nucleotide sequence-programmable DNA-binding protein domain. The Cpf1 protein has a RuvC-like endonuclease domain that is similar to the RuvC domain of Cas9 but does not have a HNH endonuclease domain, and the N-terminal of Cpf1 does not have the alpha-helical recognition lobe of Cas9. It was shown in Zetsche et al., Cell, 163, 759-771, 2015 (which is incorporated herein by reference) that, the RuvC-like domain of Cpf1 is responsible for cleaving both DNA strands and inactivation of the RuvC-like domain inactivates Cpf1 nuclease activity. For example, mutations corresponding to D917A, E1006A, or D1255A in Francisella novicida Cpf1 (SEQ ID NO: 30) inactivates Cpf1 nuclease activity. In some embodiments, the dCpf1 of the present disclosure comprises mutations corresponding to D917A, E1006A, D1255A, D917A/E1006A, D917A/D1255A, E1006A/D1255A, or D917A/E1006A/D1255A in SEQ ID NO: 30, or corresponding mutation(s) in another Cpf1. It is to be understood that any mutations, e.g., substitution mutations, deletions, or insertions that inactivate the RuvC domain of Cpf1, may be used in accordance with the present disclosure.

[0226] In some embodiments, the nucleic acid programmable DNA binding protein (napDNAbp) of any of the fusion proteins provided herein may be a Cpf1 protein. In some embodiments, the Cpf1 protein is a Cpf1 nickase (nCpf1). In some embodiments, the Cpf1 protein is a nuclease inactive Cpf1 (dCpf1). In some embodiments, the Cpf1, the nCpf1, or the dCpf1 comprises an amino acid sequence that is at least 85%, at least 90%, at least 91%, at least 92%, at least 93%, at least 94%, at least 95%, at least 96%, at least 97%, at least 98%, at least 99%, or at ease 99.5% identical to any one of SEQ ID NOs: 30-37. In some embodiments, the dCpf1 comprises an amino acid sequence that is at least 85%, at least 90%, at least 91%, at least 92%, at least 93%, at least 94%, at least 95%, at least 96%, at least 97%, at least 98%, at least 99%, or at ease 99.5% identical to any one of SEQ ID NOs: 30-37, and comprises mutations corresponding to D917A, E1006A, D1255A, D917A/E1006A, D917A/D1255A, E1006A/D1255A, and or D917A/E1006A/D1255A in SEQ ID NO: 30 or corresponding mutation(s) in another Cpf1. In some embodiments, the dCpf1 comprises an amino acid sequence of any one SEQ ID NOs: 30-37. It should be appreciated that Cpf1 from other bacterial species may also be used in accordance with the present disclosure.

Wild type Francisella novicida Cpf1 (SEQ ID NO: 30) (D917, E1006, and D1255
are bolded and underlined)
(SEQ ID NO: 30)
MSIYQEFVNKYSLSKTLRFELIPQGKTLENIKARGLILDDEKRAKDYKKAKQIIDKYHQFFIEEI
LSSVCISEDLLQNYSDVYFKLKKSDDDNLQKDFKSAKDTIKKQISEYIKDSEKFKNLFNQNLID
AKKGQESDLILWLKQSKDNGIELFKANSDITDIDEALEIIKSFKGWTTYFKGFHENRKNVYSS
NDIPTSIIYRIVDDNLPKFLENKAKYESLKDKAPEAINYEQIKKDLAEELTFDIDYKTSEVNQR
VFSLDEVFEIANFNNYLNQSGITKFNTIIGGKFVNGENTKRKGINEYINLYSQQINDKTLKKYK
MSVLFKQILSDTESKSFVIDKLEDDSDVVTTMQSFYEQIAAFKTVEEKSIKETLSLLFDDLKAQ
KLDLSKIYFKNDKSLTDLSQQVFDDYSVIGTAVLEYITQQIAPKNLDNPSKKEQELIAKKTEK
AKYLSLETIKLALEEFNKHRDIDKQCRFEEILANFAAIPMIFDEIAQNKDNLAQISIKYQNQGK
KDLLQASAEDDVKAIKDLLDQTNNLLHKLKIFHISQSEDKANILDKDEHFYLVFEECYFELAN
IVPLYNKIRNYITQKPYSDEKFKLNFENSTLANGWDKNKEPDNTAILFIKDDKYYLGVMNKK
NNKIFDDKAIKENKGEGYKKIVYKLLPGANKMLPKVFFSAKSIKFYNPSEDILRIRNHSTHTK
NGSPQKGYEKFEFNIEDCRKFIDFYKQSISKHPEWKDFGFRFSDTQRYNSIDEFYREVENQGY
KLTFENISESYIDSVVNQGKLYLFQIYNKDFSAYSKGRPNLHTLYWKALFDERNLQDVVYKL
NGEAELFYRKQSIPKKITHPAKEAIANKNKDNPKKESVFEYDLIKDKRFTEDKFFFHCPITINF
KSSGANKFNDEINLLLKEKANDVHILSIDRGERHLAYYTLVDGKGNIIKQDTFNIIGNDRMKT
NYHDKLAAIEKDRDSARKDWKKINNIKEMKEGYLSQVVHEIAKLVIEYNAIVVFEDLNFGFK
RGRFKVEKQVYQKLEKMLIEKLNYLVFKDNEFDKTGGVLRAYQLTAPFETFKKMGKQTGII
YYVPAGFTSKICPVTGFVNQLYPKYESVSKSQEFFSKFDKICYNLDKGYFEFSFDYKNFGDKA
AKGKWTIASFGSRLINFRNSDKNHNWDTREVYPTKELEKLLKDYSIEYGHGECIKAAICGESD
KKFFAKLTSVLNTILQMRNSKTGTELDYLISPVADVNGNFFDSRQAPKNMPQDADANGAYHI
GLKGLMLLGRIKNNQEGKKLNLVIKNEEYFEFVQNRNN
Francisella novicida Cpf1 D917A (SEQ ID NO: 31) (A917, E1006, and D1255 are
bolded and underlined)
(SEQ ID NO: 31)
MSIYQEFVNKYSLSKTLRFELIPQGKTLENIKARGLILDDEKRAKDYKKAKQIIDKYHQFFIEEI
LSSVCISEDLLQNYSDVYFKLKKSDDDNLQKDFKSAKDTIKKQISEYIKDSEKFKNLFNQNLID
AKKGQESDLILWLKQSKDNGIELFKANSDITDIDEALEIIKSFKGWTTYFKGFHENRKNVYSS
NDIPTSIIYRIVDDNLPKFLENKAKYESLKDKAPEAINYEQIKKDLAEELTFDIDYKTSEVNQR
VFSLDEVFEIANFNNYLNQSGITKFNTIIGGKFVNGENTKRKGINEYINLYSQQINDKTLKKYK
MSVLFKQILSDTESKSFVIDKLEDDSDVVTTMQSFYEQIAAFKTVEEKSIKETLSLLFDDLKAQ
KLDLSKIYFKNDKSLTDLSQQVFDDYSVIGTAVLEYITQQIAPKNLDNPSKKEQELIAKKTEK
AKYLSLETIKLALEEFNKHRDIDKQCRFEEILANFAAIPMIFDEIAQNKDNLAQISIKYQNQGK
KDLLQASAEDDVKAIKDLLDQTNNLLHKLKIFHISQSEDKANILDKDEHFYLVFEECYFELAN
IVPLYNKIRNYITQKPYSDEKFKLNFENSTLANGWDKNKEPDNTAILFIKDDKYYLGVMNKK
NNKIFDDKAIKENKGEGYKKIVYKLLPGANKMLPKVFFSAKSIKFYNPSEDILRIRNHSTHTK
NGSPQKGYEKFEFNIEDCRKFIDFYKQSISKHPEWKDFGFRFSDTQRYNSIDEFYREVENQGY
KLTFENISESYIDSVVNQGKLYLFQIYNKDFSAYSKGRPNLHTLYWKALFDERNLQDVVYKL
NGEAELFYRKQSIPKKITHPAKEAIANKNKDNPKKESVFEYDLIKDKRFTEDKFFFHCPITINF
KSSGANKFNDEINLLLKEKANDVHILSIARGERHLAYYTLVDGKGNIIKQDTFNIIGNDRMKT
NYHDKLAAIEKDRDSARKDWKKINNIKEMKEGYLSQVVHEIAKLVIEYNAIVVFEDLNFGFK
RGRFKVEKQVYQKLEKMLIEKLNYLVFKDNEFDKTGGVLRAYQLTAPFETFKKMGKQTGII
YYVPAGFTSKICPVTGFVNQLYPKYESVSKSQEFFSKFDKICYNLDKGYFEFSFDYKNFGDKA
AKGKWTIASFGSRLINFRNSDKNHNWDTREVYPTKELEKLLKDYSIEYGHGECIKAAICGESD
KKFFAKLTSVLNTILQMRNSKTGTELDYLISPVADVNGNFFDSRQAPKNMPQDADANGAYHI
GLKGLMLLGRIKNNQEGKKLNLVIKNEEYFEFVQNRNN
Francisella novicida Cpf1 E1006A (SEQ ID NO: 32) (D917, A1006, and D1255
are bolded and underlined)
(SEQ ID NO: 32)
MSIYQEFVNKYSLSKTLRFELIPQGKTLENIKARGLILDDEKRAKDYKKAKQIIDKYHQFFIEEI
LSSVCISEDLLQNYSDVYFKLKKSDDDNLQKDFKSAKDTIKKQISEYIKDSEKFKNLFNQNLID
AKKGQESDLILWLKQSKDNGIELFKANSDITDIDEALEIIKSFKGWTTYFKGFHENRKNVYSS
NDIPTSIIYRIVDDNLPKFLENKAKYESLKDKAPEAINYEQIKKDLAEELTFDIDYKTSEVNQR
VFSLDEVFEIANFNNYLNQSGITKFNTIIGGKFVNGENTKRKGINEYINLYSQQINDKTLKKYK
MSVLFKQILSDTESKSFVIDKLEDDSDVVTTMQSFYEQIAAFKTVEEKSIKETLSLLFDDLKAQ
KLDLSKIYFKNDKSLTDLSQQVFDDYSVIGTAVLEYITQQIAPKNLDNPSKKEQELIAKKTEK
AKYLSLETIKLALEEFNKHRDIDKQCRFEEILANFAAIPMIFDEIAQNKDNLAQISIKYQNQGK
KDLLQASAEDDVKAIKDLLDQTNNLLHKLKIFHISQSEDKANILDKDEHFYLVFEECYFELAN
IVPLYNKIRNYITQKPYSDEKFKLNFENSTLANGWDKNKEPDNTAILFIKDDKYYLGVMNKK
NNKIFDDKAIKENKGEGYKKIVYKLLPGANKMLPKVFFSAKSIKFYNPSEDILRIRNHSTHTK
NGSPQKGYEKFEFNIEDCRKFIDFYKQSISKHPEWKDFGFRFSDTQRYNSIDEFYREVENQGY
KLTFENISESYIDSVVNQGKLYLFQIYNKDFSAYSKGRPNLHTLYWKALFDERNLQDVVYKL
NGEAELFYRKQSIPKKITHPAKEAIANKNKDNPKKESVFEYDLIKDKRFTEDKFFFHCPITINF
KSSGANKFNDEINLLLKEKANDVHILSIDRGERHLAYYTLVDGKGNIIKQDTFNIIGNDRMKT
NYHDKLAAIEKDRDSARKDWKKINNIKEMKEGYLSQVVHEIAKLVIEYNAIVVFADLNFGFK
RGRFKVEKQVYQKLEKMLIEKLNYLVFKDNEFDKTGGVLRAYQLTAPFETFKKMGKQTGII
YYVPAGFTSKICPVTGFVNQLYPKYESVSKSQEFFSKFDKICYNLDKGYFEFSFDYKNFGDKA
AKGKWTIASFGSRLINFRNSDKNHNWDTREVYPTKELEKLLKDYSIEYGHGECIKAAICGESD
KKFFAKLTSVLNTILQMRNSKTGTELDYLISPVADVNGNFFDSRQAPKNMPQDADANGAYHI
GLKGLMLLGRIKNNQEGKKLNLVIKNEEYFEFVQNRNN
Francisella novicida Cpf1 D1255A (SEQ ID NO: 33) (D917, E1006, and A1255
are bolded and underlined)
(SEQ ID NO: 33)
MSIYQEFVNKYSLSKTLRFELIPQGKTLENIKARGLILDDEKRAKDYKKAKQIIDKYHQFFIEEI
LSSVCISEDLLQNYSDVYFKLKKSDDDNLQKDFKSAKDTIKKQISEYIKDSEKFKNLFNQNLID
AKKGQESDLILWLKQSKDNGIELFKANSDITDIDEALEIIKSFKGWTTYFKGFHENRKNVYSS
NDIPTSIIYRIVDDNLPKFLENKAKYESLKDKAPEAINYEQIKKDLAEELTFDIDYKTSEVNQR
VFSLDEVFEIANFNNYLNQSGITKFNTIIGGKFVNGENTKRKGINEYINLYSQQINDKTLKKYK
MSVLFKQILSDTESKSFVIDKLEDDSDVVTTMQSFYEQIAAFKTVEEKSIKETLSLLFDDLKAQ
KLDLSKIYFKNDKSLTDLSQQVEDDYSVIGTAVLEYITQQIAPKNLDNPSKKEQELIAKKTEK
AKYLSLETIKLALEEFNKHRDIDKQCRFEEILANFAAIPMIFDEIAQNKDNLAQISIKYQNQGK
KDLLQASAEDDVKAIKDLLDQTNNLLHKLKIFHISQSEDKANILDKDEHFYLVFEECYFELAN
IVPLYNKIRNYITQKPYSDEKFKLNFENSTLANGWDKNKEPDNTAILFIKDDKYYLGVMNKK
NNKIFDDKAIKENKGEGYKKIVYKLLPGANKMLPKVFFSAKSIKFYNPSEDILRIRNHSTHTK
NGSPQKGYEKFEFNIEDCRKFIDFYKQSISKHPEWKDFGFRFSDTQRYNSIDEFYREVENQGY
KLTFENISESYIDSVVNQGKLYLFQIYNKDFSAYSKGRPNLHTLYWKALFDERNLQDVVYKL
NGEAELFYRKQSIPKKITHPAKEAIANKNKDNPKKESVFEYDLIKDKRFTEDKFFFHCPITINF
KSSGANKFNDEINLLLKEKANDVHILSIDRGERHLAYYTLVDGKGNIIKQDTFNIIGNDRMKT
NYHDKLAAIEKDRDSARKDWKKINNIKEMKEGYLSQVVHEIAKLVIEYNAIVVFEDLNFGFK
RGRFKVEKQVYQKLEKMLIEKLNYLVFKDNEFDKTGGVLRAYQLTAPFETFKKMGKQTGII
YYVPAGFTSKICPVTGFVNQLYPKYESVSKSQEFFSKFDKICYNLDKGYFEFSFDYKNFGDKA
AKGKWTIASFGSRLINFRNSDKNHNWDTREVYPTKELEKLLKDYSIEYGHGECIKAAICGESD
KKFFAKLTSVLNTILQMRNSKTGTELDYLISPVADVNGNFFDSRQAPKNMPQDAAANGAYHI
GLKGLMLLGRIKNNQEGKKLNLVIKNEEYFEFVQNRNN
Francisella novicida Cpf1 D917A/E1006A (SEQ ID NO: 34) (A917, A1006, and
D1255 are bolded and underlined)
(SEQ ID NO: 34)
MSIYQEFVNKYSLSKTLRFELIPQGKTLENIKARGLILDDEKRAKDYKKAKQIIDKYHQFFIEEI
LSSVCISEDLLQNYSDVYFKLKKSDDDNLQKDFKSAKDTIKKQISEYIKDSEKFKNLFNQNLID
AKKGQESDLILWLKQSKDNGIELFKANSDITDIDEALEIIKSFKGWTTYFKGFHENRKNVYSS
NDIPTSIIYRIVDDNLPKFLENKAKYESLKDKAPEAINYEQIKKDLAEELTFDIDYKTSEVNQR
VFSLDEVFEIANFNNYLNQSGITKFNTIIGGKFVNGENTKRKGINEYINLYSQQINDKTLKKYK
MSVLFKQILSDTESKSFVIDKLEDDSDVVTTMQSFYEQIAAFKTVEEKSIKETLSLLFDDLKAQ
KLDLSKIYFKNDKSLTDLSQQVEDDYSVIGTAVLEYITQQIAPKNLDNPSKKEQELIAKKTEK
AKYLSLETIKLALEEFNKHRDIDKQCRFEEILANFAAIPMIFDEIAQNKDNLAQISIKYQNQGK
KDLLQASAEDDVKAIKDLLDQTNNLLHKLKIFHISQSEDKANILDKDEHFYLVFEECYFELAN
IVPLYNKIRNYITQKPYSDEKFKLNFENSTLANGWDKNKEPDNTAILFIKDDKYYLGVMNKK
NNKIFDDKAIKENKGEGYKKIVYKLLPGANKMLPKVFFSAKSIKFYNPSEDILRIRNHSTHTK
NGSPQKGYEKFEFNIEDCRKFIDFYKQSISKHPEWKDFGFRFSDTQRYNSIDEFYREVENQGY
KLTFENISESYIDSVVNQGKLYLFQIYNKDFSAYSKGRPNLHTLYWKALFDERNLQDVVYKL
NGEAELFYRKQSIPKKITHPAKEAIANKNKDNPKKESVFEYDLIKDKRFTEDKFFFHCPITINF
KSSGANKFNDEINLLLKEKANDVHILSIARGERHLAYYTLVDGKGNIIKQDTFNIIGNDRMKT
NYHDKLAAIEKDRDSARKDWKKINNIKEMKEGYLSQVVHEIAKLVIEYNAIVVFADLNFGFK
RGRFKVEKQVYQKLEKMLIEKLNYLVFKDNEFDKTGGVLRAYQLTAPFETFKKMGKQTGII
YYVPAGFTSKICPVTGFVNQLYPKYESVSKSQEFFSKFDKICYNLDKGYFEFSFDYKNFGDKA
AKGKWTIASFGSRLINFRNSDKNHNWDTREVYPTKELEKLLKDYSIEYGHGECIKAAICGESD
KKFFAKLTSVLNTILQMRNSKTGTELDYLISPVADVNGNFFDSRQAPKNMPQDADANGAYHI
GLKGLMLLGRIKNNQEGKKLNLVIKNEEYFEFVQNRNN
Francisella novicida Cpf1 D917A/D1255A (SEQ ID NO: 35) (A917, E1006, and
A1255 are bolded and underlined)
(SEQ ID NO: 35)
MSIYQEFVNKYSLSKTLRFELIPQGKTLENIKARGLILDDEKRAKDYKKAKQIIDKYHQFFIEEI
LSSVCISEDLLQNYSDVYFKLKKSDDDNLQKDFKSAKDTIKKQISEYIKDSEKFKNLFNQNLID
AKKGQESDLILWLKQSKDNGIELFKANSDITDIDEALEIIKSFKGWTTYFKGFHENRKNVYSS
NDIPTSIIYRIVDDNLPKFLENKAKYESLKDKAPEAINYEQIKKDLAEELTFDIDYKTSEVNQR
VFSLDEVFEIANFNNYLNQSGITKFNTIIGGKFVNGENTKRKGINEYINLYSQQINDKTLKKYK
MSVLFKQILSDTESKSFVIDKLEDDSDVVTTMQSFYEQIAAFKTVEEKSIKETLSLLFDDLKAQ
KLDLSKIYFKNDKSLTDLSQQVEDDYSVIGTAVLEYITQQIAPKNLDNPSKKEQELIAKKTEK
AKYLSLETIKLALEEFNKHRDIDKQCRFEEILANFAAIPMIFDEIAQNKDNLAQISIKYQNQGK
KDLLQASAEDDVKAIKDLLDQTNNLLHKLKIFHISQSEDKANILDKDEHFYLVFEECYFELAN
IVPLYNKIRNYITQKPYSDEKFKLNFENSTLANGWDKNKEPDNTAILFIKDDKYYLGVMNKK
NNKIFDDKAIKENKGEGYKKIVYKLLPGANKMLPKVFFSAKSIKFYNPSEDILRIRNHSTHTK
NGSPQKGYEKFEFNIEDCRKFIDFYKQSISKHPEWKDFGFRFSDTQRYNSIDEFYREVENQGY
KLTFENISESYIDSVVNQGKLYLFQIYNKDFSAYSKGRPNLHTLYWKALFDERNLQDVVYKL
NGEAELFYRKQSIPKKITHPAKEAIANKNKDNPKKESVFEYDLIKDKRFTEDKFFFHCPITINF
KSSGANKFNDEINLLLKEKANDVHILSIARGERHLAYYTLVDGKGNIIKQDTFNIIGNDRMKT
NYHDKLAAIEKDRDSARKDWKKINNIKEMKEGYLSQVVHEIAKLVIEYNAIVVFEDLNFGFK
RGRFKVEKQVYQKLEKMLIEKLNYLVFKDNEFDKTGGVLRAYQLTAPFETFKKMGKQTGII
YYVPAGFTSKICPVTGFVNQLYPKYESVSKSQEFFSKFDKICYNLDKGYFEFSFDYKNFGDKA
AKGKWTIASFGSRLINFRNSDKNHNWDTREVYPTKELEKLLKDYSIEYGHGECIKAAICGESD
KKFFAKLTSVLNTILQMRNSKTGTELDYLISPVADVNGNFFDSRQAPKNMPQDAAANGAYHI
GLKGLMLLGRIKNNQEGKKLNLVIKNEEYFEFVQNRNN
Francisella novicida Cpf1 E1006A/D1255A (SEQ ID NO: 36) (D917, A1006, and
A1255 are bolded and underlined)
(SEQ ID NO: 36)
MSIYQEFVNKYSLSKTLRFELIPQGKTLENIKARGLILDDEKRAKDYKKAKQIIDKYHQFFIEEI
LSSVCISEDLLQNYSDVYFKLKKSDDDNLQKDFKSAKDTIKKQISEYIKDSEKFKNLFNQNLID
AKKGQESDLILWLKQSKDNGIELFKANSDITDIDEALEIIKSFKGWTTYFKGFHENRKNVYSS
NDIPTSIIYRIVDDNLPKFLENKAKYESLKDKAPEAINYEQIKKDLAEELTFDIDYKTSEVNQR
VFSLDEVFEIANFNNYLNQSGITKFNTIIGGKFVNGENTKRKGINEYINLYSQQINDKTLKKYK
MSVLFKQILSDTESKSFVIDKLEDDSDVVTTMQSFYEQIAAFKTVEEKSIKETLSLLFDDLKAQ
KLDLSKIYFKNDKSLTDLSQQVFDDYSVIGTAVLEYITQQIAPKNLDNPSKKEQELIAKKTEK
AKYLSLETIKLALEEFNKHRDIDKQCRFEEILANFAAIPMIFDEIAQNKDNLAQISIKYQNQGK
KDLLQASAEDDVKAIKDLLDQTNNLLHKLKIFHISQSEDKANILDKDEHFYLVFEECYFELAN
IVPLYNKIRNYITQKPYSDEKFKLNFENSTLANGWDKNKEPDNTAILFIKDDKYYLGVMNKK
NNKIFDDKAIKENKGEGYKKIVYKLLPGANKMLPKVFFSAKSIKFYNPSEDILRIRNHSTHTK
NGSPQKGYEKFEFNIEDCRKFIDFYKQSISKHPEWKDFGFRFSDTQRYNSIDEFYREVENQGY
KLTFENISESYIDSVVNQGKLYLFQIYNKDFSAYSKGRPNLHTLYWKALFDERNLQDVVYKL
NGEAELFYRKQSIPKKITHPAKEAIANKNKDNPKKESVFEYDLIKDKRFTEDKFFFHCPITINF
KSSGANKFNDEINLLLKEKANDVHILSIDRGERHLAYYTLVDGKGNIIKQDTFNIIGNDRMKT
NYHDKLAAIEKDRDSARKDWKKINNIKEMKEGYLSQVVHEIAKLVIEYNAIVVFADLNFGFK
RGRFKVEKQVYQKLEKMLIEKLNYLVFKDNEFDKTGGVLRAYQLTAPFETFKKMGKQTGII
YYVPAGFTSKICPVTGFVNQLYPKYESVSKSQEFFSKFDKICYNLDKGYFEFSFDYKNFGDKA
AKGKWTIASFGSRLINFRNSDKNHNWDTREVYPTKELEKLLKDYSIEYGHGECIKAAICGESD
KKFFAKLTSVLNTILQMRNSKTGTELDYLISPVADVNGNFFDSRQAPKNMPQDAAANGAYHI
GLKGLMLLGRIKNNQEGKKLNLVIKNEEYFEFVQNRNN
Francisella novicida Cpf1 D917A/E1006A/D1255A (SEQ ID NO: 37) (A917,
A1006, and A1255 are bolded and underlined)
(SEQ ID NO: 37)
MSIYQEFVNKYSLSKTLRFELIPQGKTLENIKARGLILDDEKRAKDYKKAKQIIDKYHQFFIEEI
LSSVCISEDLLQNYSDVYFKLKKSDDDNLQKDFKSAKDTIKKQISEYIKDSEKFKNLFNQNLID
AKKGQESDLILWLKQSKDNGIELFKANSDITDIDEALEIIKSFKGWTTYFKGFHENRKNVYSS
NDIPTSIIYRIVDDNLPKFLENKAKYESLKDKAPEAINYEQIKKDLAEELTFDIDYKTSEVNQR
VFSLDEVFEIANFNNYLNQSGITKFNTIIGGKFVNGENTKRKGINEYINLYSQQINDKTLKKYK
MSVLFKQILSDTESKSFVIDKLEDDSDVVTTMQSFYEQIAAFKTVEEKSIKETLSLLFDDLKAQ
KLDLSKIYFKNDKSLTDLSQQVFDDYSVIGTAVLEYITQQIAPKNLDNPSKKEQELIAKKTEK
AKYLSLETIKLALEEFNKHRDIDKQCRFEEILANFAAIPMIFDEIAQNKDNLAQISIKYQNQGK
KDLLQASAEDDVKAIKDLLDQTNNLLHKLKIFHISQSEDKANILDKDEHFYLVFEECYFELAN
IVPLYNKIRNYITQKPYSDEKFKLNFENSTLANGWDKNKEPDNTAILFIKDDKYYLGVMNKK
NNKIFDDKAIKENKGEGYKKIVYKLLPGANKMLPKVFFSAKSIKFYNPSEDILRIRNHSTHTK
NGSPQKGYEKFEFNIEDCRKFIDFYKQSISKHPEWKDFGFRFSDTQRYNSIDEFYREVENQGY
KLTFENISESYIDSVVNQGKLYLFQIYNKDFSAYSKGRPNLHTLYWKALFDERNLQDVVYKL
NGEAELFYRKQSIPKKITHPAKEAIANKNKDNPKKESVFEYDLIKDKRFTEDKFFFHCPITINF
KSSGANKFNDEINLLLKEKANDVHILSIARGERHLAYYTLVDGKGNIIKQDTFNIIGNDRMKT
NYHDKLAAIEKDRDSARKDWKKINNIKEMKEGYLSQVVHEIAKLVIEYNAIVVFADLNFGFK
RGRFKVEKQVYQKLEKMLIEKLNYLVFKDNEFDKTGGVLRAYQLTAPFETFKKMGKQTGII
YYVPAGFTSKICPVTGFVNQLYPKYESVSKSQEFFSKFDKICYNLDKGYFEFSFDYKNFGDKA
AKGKWTIASFGSRLINFRNSDKNHNWDTREVYPTKELEKLLKDYSIEYGHGECIKAAICGESD
KKFFAKLTSVLNTILQMRNSKTGTELDYLISPVADVNGNFFDSRQAPKNMPQDAAANGAYHI
GLKGLMLLGRIKNNQEGKKLNLVIKNEEYFEFVQNRNN

[0227] In some embodiments, the nucleic acid programmable DNA binding protein (napDNAbp) is a nucleic acid programmable DNA binding protein that does not require a canonical (NGG) PAM sequence. In some embodiments, the napDNAbp is an argonaute protein. One example of such a nucleic acid programmable DNA binding protein is an Argonaute protein from Natronobacterium gregoryi (NgAgo). NgAgo is a ssDNA-guided endonuclease. NgAgo binds 5′ phosphorylated ssDNA of ˜24 nucleotides (gDNA) to guide it to its target site and will make DNA double-strand breaks at the gDNA site. In contrast to Cas9, the NgAgo-gDNA system does not require a protospacer-adjacent motif (PAM). Using a nuclease inactive NgAgo (dNgAgo) can greatly expand the bases that may be targeted. The characterization and use of NgAgo have been described in Gao et al., Nat Biotechnol., 2016 July; 34(7):768-73. PubMed PMID: 27136078; Swarts et al., Nature. 507(7491) (2014):258-61; and Swarts et al., Nucleic Acids Res. 43(10) (2015):5120-9, each of which is incorporated herein by reference. The sequence of Natronobacterium gregoryi Argonaute is provided in SEQ ID NO: 38.

Wild type Natronobacterium gregoryi Argonaute (SEQ ID NO: 38)
(SEQ ID NO: 38)
MTVIDLDSTTTADELTSGHTYDISVTLTGVYDNTDEQHPRMSLAFEQDNGERRYITLWKNTT
PKDVFTYDYATGSTYIFTNIDYEVKDGYENLTATYQTTVENATAQEVGTTDEDETFAGGEPL
DHHLDDALNETPDDAETESDSGHVMTSFASRDQLPEWTLHTYTLTATDGAKTDTEYARRTL
AYTVRQELYTDHDAAPVATDGLMLLTPEPLGETPLDLDCGVRVEADETRTLDYTTAKDRLL
ARELVEEGLKRSLWDDYLVRGIDEVLSKEPVLTCDEFDLHERYDLSVEVGHSGRAYLHINFR
HRFVPKLTLADIDDDNIYPGLRVKTTYRPRRGHIVWGLRDECATDSLNTLGNQSVVAYHRN
NQTPINTDLLDAIEAADRRVVETRRQGHGDDAVSFPQELLAVEPNTHQIKQFASDGFHQQAR
SKTRLSASRCSEKAQAFAERLDPVRLNGSTVEFSSEFFTGNNEQQLRLLYENGESVLTFRDGA
RGAHPDETFSKGIVNPPESFEVAVVLPEQQADTCKAQWDTMADLLNQAGAPPTRSETVQYD
AFSSPESISLNVAGAIDPSEVDAAFVVLPPDQEGFADLASPTETYDELKKALANMGIYSQMAY
FDRFRDAKIFYTRNVALGLLAAAGGVAFTTEHAMPGDADMFIGIDVSRSYPEDGASGQINIA
ATATAVYKDGTILGHSSTRPQLGEKLQSTDVRDIMKNAILGYQQVTGESPTHIVIHRDGFMNE
DLDPATEFLNEQGVEYDIVEIRKQPQTRLLAVSDVQYDTPVKSIAAINQNEPRATVATFGAPE
YLATRDGGGLPRPIQIERVAGETDIETLTRQVYLLSQSHIQVHNSTARLPITTAYADQASTHAT
KGYLVQTGAFESNVGFL

[0228] In some embodiments, the napDNAbp is a prokaryotic homolog of an Argonaute protein. Prokaryotic homologs of Argonaute proteins are known and have been described, for example, in Makarova K., et al., “Prokaryotic homologs of Argonaute proteins are predicted to function as key components of a novel system of defense against mobile genetic elements”, Biol Direct. 2009 Aug. 25; 4:29. doi: 10.1186/1745-6150-4-29, the entire contents of which is hereby incorporated by reference. In some embodiments, the napDNAbp is a Marinitoga piezophila Argunaute (MpAgo) protein. The CRISPR-associated Marinitoga piezophila Argunaute (MpAgo) protein cleaves single-stranded target sequences using 5′-phosphorylated guides. The 5′ guides are used by all known Argonautes. The crystal structure of an MpAgo-RNA complex shows a guide strand binding site comprising residues that block 5′ phosphate interactions. This data suggests the evolution of an Argonaute subclass with noncanonical specificity for a 5′-hydroxylated guide. See, e.g., Kaya et al., “A bacterial Argonaute with noncanonical guide RNA specificity”, Proc Natl Acad Sci USA. 2016 Apr. 12; 113(15):4057-62, the entire contents of which are hereby incorporated by reference). It should be appreciated that other argonaute proteins may be used, and are within the scope of this disclosure.

[0229] In some embodiments, the nucleic acid programmable DNA binding protein (napDNAbp) is a single effector of a microbial CRISPR-Cas system. Single effectors of microbial CRISPR-Cas systems include, without limitation, Cas9, Cpf1, C2c1, C2c2, and C2c3. Typically, microbial CRISPR-Cas systems are divided into Class 1 and Class 2 systems. Class 1 systems have multisubunit effector complexes, while Class 2 systems have a single protein effector. For example, Cas9 and Cpf1 are Class 2 effectors. In addition to Cas9 and Cpf1, three distinct Class 2 CRISPR-Cas systems (C2c1, C2c2, and C2c3) have been described by Shmakov et al., “Discovery and Functional Characterization of Diverse Class 2 CRISPR Cas Systems”, Mol. Cell, 2015 Nov. 5; 60(3): 385-397, the entire contents of which is hereby incorporated by reference. Effectors of two of the systems, C2c1 and C2c3, contain RuvC-like endonuclease domains related to Cpf1. A third system, C2c2 contains an effector with two predicated HEPN RNase domains. Production of mature CRISPR RNA is tracrRNA-independent, unlike production of CRISPR RNA by C2c1. C2c1 depends on both CRISPR RNA and tracrRNA for DNA cleavage. Bacterial C2c2 has been shown to possess a unique RNase activity for CRISPR RNA maturation distinct from its RNA-activated single-stranded RNA degradation activity. These RNase functions are different from each other and from the CRISPR RNA-processing behavior of Cpf1. See, e.g., East-Seletsky, et al., “Two distinct RNase activities of CRISPR-C2c2 enable guide-RNA processing and RNA detection”, Nature, 2016 Oct. 13; 538(7624):270-273, the entire contents of which are hereby incorporated by reference. In vitro biochemical analysis of C2c2 in Leptotrichia shahii has shown that C2c2 is guided by a single CRISPR RNA and can be programed to cleave ssRNA targets carrying complementary protospacers. Catalytic residues in the two conserved HEPN domains mediate cleavage. Mutations in the catalytic residues generate catalytically inactive RNA-binding proteins. See e.g., Abudayyeh et al., “C2c2 is a single-component programmable RNA-guided RNA-targeting CRISPR effector”, Science, 2016 Aug. 5; 353(6299), the entire contents of which are hereby incorporated by reference.

[0230] The crystal structure of Alicyclobaccillus acidoterrastris C2c1 (AacC2c1) has been reported in complex with a chimeric single-molecule guide RNA (sgRNA). See e.g., Liu et al., “C2c1-sgRNA Complex Structure Reveals RNA-Guided DNA Cleavage Mechanism”, Mol. Cell, 2017 Jan. 19; 65(2):310-322, the entire contents of which are hereby incorporated by reference. The crystal structure has also been reported in Alicyclobacillus acidoterrestris C2c1 bound to target DNAs as ternary complexes. See e.g., Yang et al., “PAM-dependent Target DNA Recognition and Cleavage by C2C1 CRISPR-Cas endonuclease”, Cell, 2016 Dec. 15; 167(7):1814-1828, the entire contents of which are hereby incorporated by reference. Catalytically competent conformations of AacC2c1, both with target and non-target DNA strands, have been captured independently positioned within a single RuvC catalytic pocket, with C2c1-mediated cleavage resulting in a staggered seven-nucleotide break of target DNA. Structural comparisons between C2c1 ternary complexes and previously identified Cas9 and Cpf1 counterparts demonstrate the diversity of mechanisms used by CRISPR-Cas9 systems.

[0231] In some embodiments, the nucleic acid programmable DNA binding protein (napDNAbp) of any of the fusion proteins provided herein may be a C2c1, a C2c2, or a C2c3 protein. In some embodiments, the napDNAbp is a C2c1 protein. In some embodiments, the napDNAbp is a C2c2 protein. In some embodiments, the napDNAbp is a C2c3 protein. In some embodiments, the napDNAbp comprises an amino acid sequence that is at least 85%, at least 90%, at least 91%, at least 92%, at least 93%, at least 94%, at least 95%, at least 96%, at least 97%, at least 98%, at least 99%, or at ease 99.5% identical to a naturally-occurring C2c1, C2c2, or C2c3 protein. In some embodiments, the napDNAbp is a naturally-occurring C2c1, C2c2, or C2c3 protein. In some embodiments, the napDNAbp comprises an amino acid sequence that is at least 85%, at least 90%, at least 91%, at least 92%, at least 93%, at least 94%, at least 95%, at least 96%, at least 97%, at least 98%, at least 99%, or at ease 99.5% identical to any one of SEQ ID NOs: 39-40. It should be appreciated that C2c1, C2c2, or C2c3 from other bacterial species may also be used in accordance with the present disclosure.

C2c1 (uniprot.org/uniprot/T0D7A2#)
sp|T0D7A2|C2C1_ALIAG CRISPR-associated endonuclease C2c1
OS = Alicyclobacillus acidoterrestris (strain ATCC 49025/DSM 3922/CIP 106132/
NCIMB 13137/GD3B) GN = c2c1 PE = 1 SV = 1
(SEQ ID NO: 39)
MAVKSIKVKLRLDDMPEIRAGLWKLHKEVNAGVRYYTEWLSLLRQENLYRRSPNGDGEQEC
DKTAEECKAELLERLRARQVENGHRGPAGSDDELLQLARQLYELLVPQAIGAKGDAQQIARKFLSPLA
DKDAVGGLGIAKAGNKPRWVRMREAGEPGWEEEKEKAETRKSADRTADVLRALADFGLKPLMRVY
TDSEMSSVEWKPLRKGQAVRTWDRDMFQQAIERMMSWESWNQRVGQEYAKLVEQKNRFEQKNFVG
QEHLVHLVNQLQQDMKEASPGLESKEQTAHYVTGRALRGSDKVFEKWGKLAPDAPFDLYDAEIKNV
QRRNTRRFGSHDLFAKLAEPEYQALWREDASFLTRYAVYNSILRKLNHAKMFATFTLPDATAHPIWTR
FDKLGGNLHQYTFLFNEFGERRHAIRFHKLLKVENGVAREVDDVTVPISMSEQLDNLLPRDPNEPIALY
FRDYGAEQHFTGEFGGAKIQCRRDQLAHMHRRRGARDVYLNVSVRVQSQSEARGERRPPYAAVFRLV
GDNHRAFVHFDKLSDYLAEHPDDGKLGSEGLLSGLRVMSVDLGLRTSASISVFRVARKDELKPNSKGR
VPFFFPIKGNDNLVAVHERSQLLKLPGETESKDLRAIREERQRTLRQLRTQLAYLRLLVRCGSEDVGRR
ERSWAKLIEQPVDAANHMTPDWREAFENELQKLKSLHGICSDKEWMDAVYESVRRVWRHMGKQVR
DWRKDVRSGERPKIRGYAKDVVGGNSIEQIEYLERQYKFLKSWSFFGKVSGQVIRAEKGSRFAITLREH
IDHAKEDRLKKLADRIIMEALGYVYALDERGKGKWVAKYPPCQLILLEELSEYQFNNDRPPSENNQLM
QWSHRGVFQELINQAQVHDLLVGTMYAAFSSRFDARTGAPGIRCRRVPARCTQEHNPEPFPWWLNKF
VVEHTLDACPLRADDLIPTGEGEIFVSPFSAEEGDFHQIHADLNAAQNLQQRLWSDFDISQIRLRCDWG
EVDGELVLIPRLTGKRTADSYSNKVFYTNTGVTYYERERGKKRRKVFAQEKLSEEEAELLVEADEARE
KSVVLMRDPSGIINRGNWTRQKEFWSMVNQRIEGYLVKQIRSRVPLQDSACENTGDI
C2c2 (uniprot.org/uniprot/P0DOC6)
>sp|P0DOC6|C2C2_LEPSD CRISPR-associated endoribonuclease C2c2
OS = Leptotrichia shahii (strain DSM 19757/CCUG 47503/CIP 107916/JCM 16776/
LB37) GN = c2c2 PE = 1 SV = 1
(SEQ ID NO: 40)
MGNLFGHKRWYEVRDKKDFKIKRKVKVKRNYDGNKYILNINENNNKEKIDNNKFIRKYINYK
KNDNILKEFTRKFHAGNILFKLKGKEGIIRIENNDDFLETEEVVLYIEAYGKSEKLKALGITKKKIIDEAIR
QGITKDDKKIEIKRQENEEEIEIDIRDEYTNKTLNDCSIILRIIENDELETKKSIYEIFKNINMSLYKIIEKIIE
NETEKVFENRYYEEHLREKLLKDDKIDVILTNFMEIREKIKSNLEILGFVKFYLNVGGDKKKSKNKKML
VEKILNINVDLTVEDIADFVIKELEFWNITKRIEKVKKVNNEFLEKRRNRTYIKSYVLLDKHEKFKIERE
NKKDKIVKFFVENIKNNSIKEKIEKILAEFKIDELIKKLEKELKKGNCDTEIFGIFKKHYKVNFDSKKFSK
KSDEEKELYKIIYRYLKGRIEKILVNEQKVRLKKMEKIEIEKILNESILSEKILKRVKQYTLEHIMYLGKL
RHNDIDMTTVNTDDFSRLHAKEELDLELITFFASTNMELNKIFSRENINNDENIDFFGGDREKNYVLDK
KILNSKIKIIRDLDFIDNKNNITNNFIRKFTKIGTNERNRILHAISKERDLQGTQDDYNKVINIIQNLKISDE
EVSKALNLDVVFKDKKNIITKINDIKISEENNNDIKYLPSFSKVLPEILNLYRNNPKNEPFDTIETEKIVLN
ALIYVNKELYKKLILEDDLEENESKNIFLQELKKTLGNIDEIDENIIENYYKNAQISASKGNNKAIKKYQK
KVIECYIGYLRKNYEELFDFSDFKMNIQEIKKQIKDINDNKTYERITVKTSDKTIVINDDFEYIISIFALLNS
NAVINKIRNRFFATSVWLNTSEYQNIIDILDEIMQLNTLRNECITENWNLNLEEFIQKMKEIEKDFDDFKI
QTKKEIFNNYYEDIKNNILTEFKDDINGCDVLEKKLEKIVIFDDETKFEIDKKSNILQDEQRKLSNINKKD
LKKKVDQYIKDKDQEIKSKILCRIIFNSDFLKKYKKEIDNLIEDMESENENKFQEIYYPKERKNELYIYKK
NLFLNIGNPNFDKIYGLISNDIKMADAKFLFNIDGKNIRKNKISEIDAILKNLNDKLNGYSKEYKEKYIKK
LKENDDFFAKNIQNKNYKSFEKDYNRVSEYKKIRDLVEFNYLNKIESYLIDINWKLAIQMARFERDMH
YIVNGLRELGIIKLSGYNTGISRAYPKRNGSDGFYTTTAYYKFFDEESYKKFEKICYGFGIDLSENSEINK
PENESIRNYISHFYIVRNPFADYSIAEQIDRVSNLLSYSTRYNNSTYASVFEVFKKDVNLDYDELKKKFK
LIGNNDILERLMKPKKVSVLELESYNSDYIKNLIIELLTKIENTNDTL

### Cas9 Domains of the Disclosed Base Editors

[0232] In some aspects, a nucleic acid programmable DNA binding protein (napDNAbp) is a Cas9 domain. Non-limiting, exemplary Cas9 domains are provided herein. The Cas9 domain may be a nuclease active Cas9 domain, a nuclease inactive Cas9 domain, or a Cas9 nickase. In some embodiments, the Cas9 domain is a nuclease active domain. For example, the Cas9 domain may be a Cas9 domain that cuts both strands of a duplexed nucleic acid (e.g., both strands of a duplexed DNA molecule). In some embodiments, the Cas9 domain comprises any one of the amino acid sequences as set forth in SEQ ID NOs: 4-29, 724-736. In some embodiments the Cas9 domain comprises an amino acid sequence that is at least 60%, at least 65%, at least 70%, at least 75%, at least 80%, at least 85%, at least 90%, at least 95%, at least 96%, at least 97%, at least 98%, at least 99%, or at least 99.5% identical to any Cas9 provided herein, or to one of the amino acid sequences set forth in SEQ ID NOs: 4-29, 724-736. In some embodiments, the Cas9 domain comprises an amino acid sequence that has 1,2, 3,4, 5, 6,7, 8, 9, 10, 11, 12, 13, 14, 15, 16, 17, 18, 19, 20, 21, 22, 21, 24, 25, 26, 27, 28, 29, 30, 31, 32, 33, 34, 35, 36, 37, 38, 39, 40, 41, 42, 43, 44, 45, 46, 47, 48, 49, 50 or more mutations compared to any Cas9 provided herein, or to any one of the amino acid sequences set forth in SEQ ID NOs: 4-29, 724-736. In some embodiments, the Cas9 domain comprises an amino acid sequence that has at least 10, at least 15, at least 20, at least 30, at least 40, at least 50, at least 60, at least 70, at least 80, at least 90, at least 100, at least 150, at least 200, at least 250, at least 300, at least 350, at least 400, at least 500, at least 600, at least 700, at least 800, at least 900, at least 1000, at least 1100, or at least 1200 identical contiguous (or consecutive) amino acid residues as compared to any Cas9 provided herein or any one of the amino acid sequences set forth in SEQ ID NOs: 4-29, 724-736.

[0233] In some aspects, the CGBEs of the disclosure include a napDNAbp domain that is a Cas9 variant having a higher targeting specificity than the Cas9 domains of previously disclosed CGBEs. In some embodiments, the napDNAbp domain is selected from a HypaCas9, a HF-nCas9-NG, a Sniper-nCas9, an HF-Hypa-nCas9, an e-Cas9, an e-HF-Hypa-nCas9, and an e-Hypa-Cas9. In some aspects, the napDNAbp domain is selected from an HF-nCas9-NG, an HF-Hypa-nCas9, and an e-HF-Hypa-nCas9. In some embodiments, the CGBEs of the disclosure may comprise: (i) a napDNAbp domain, (ii) a cytidine deaminase domain, (iii) a first uracil binding protein (UBP) domain, and (iv) a DNA repair protein; or (i) a napDNAbp domain, (ii) a cytidine deaminase domain, (iii) a first UBP domain, and (iv) a second UBP domain, wherein the napDNAbp domain is selected from a HypaCas9, a HF-nCas9-NG, a Sniper-nCas9, an HF-Hypa-nCas9, an e-Cas9, an e-HF-Hypa-nCas9, and an e-Hypa-Cas9. In some embodiments, the napDNAbp domain of any of the disclosed CGBEs comprises an amino acid sequence that is at least 85%, 90%, 92.5%, 95%, 97%, 98%, or 99% identical to any of the sequences set forth as SEQ ID NOs: 724-736. In some embodiments, the napDNAbp domain of any of the disclosed CGBEs is selected from SEQ ID NOs: 724-736.

[0234] In some embodiments, the napDNAbp of any of the disclosed base editors comprises the amino acid sequence of SEQ ID NO: 9 (dCas9). In some embodiments, the napDNAbp of any of the disclosed base editors comprises the amino acid sequence of SEQ ID NO: 16 (nCas9).

[0235] In some embodiments, the disclosed base editors may comprise a catalytically inactive, or “dead,” napDNAbp domain. Exemplary catalytically inactive domains in the disclosed base editors are dead S. pyogenes Cas9 (dSpCas9), dead S. aureus Cas9 (dSaCas9) and dead Lachnospiraceae bacterium Cas12a (dLbCas12a).

[0236] In certain embodiments, the base editors described herein may include a dead Cas9, e.g., dead SpCas9, which has no nuclease activity due to one or more mutations that inactivate both nuclease domains of SpCas9, namely the RuvC domain (which cleaves the non-protospacer DNA strand) and HNH domain (which cleaves the protospacer DNA strand). The nuclease inactivation may be due to one or mutations that result in one or more substitutions and/or deletions in the amino acid sequence of the encoded protein, or any variants thereof having at least 80%, at least 85%, at least 90%, at least 95%, or at least 99% sequence identity thereto.

[0237] In certain embodiments, the base editors described herein may include a dead Cas9, e.g., dead SpCas9, which has no nuclease activity due to one or more mutations that inactivate both nuclease domains of SaCas9, namely the RuvC domain (which cleaves the non-protospacer DNA strand) and HNH domain (which cleaves the protospacer DNA strand). The D10A and N580A mutations in the wild-type S. aureus Cas9 amino acid sequence may be used to form a dSaCas9. Accordingly, in some embodiments, the napDNAbp domain of the base editors provided herein comprises a dSaCas9 that has D10A and N580A mutations relative to the wild-type SaCas9 sequence (SEQ ID NO: 377).

[0238] In some embodiments, the Cas9 domain is a nuclease-inactive Cas9 domain (dCas9). For example, the dCas9 domain may bind to a duplexed nucleic acid molecule (e.g., via a gRNA molecule) without cleaving either strand of the duplexed nucleic acid molecule. In some embodiments, the nuclease-inactive dCas9 domain comprises a D10X mutation and a H840X mutation of the amino acid sequence set forth in SEQ ID NO: 6, or a corresponding mutation in any Cas9 provided herein, such as one of the amino acid sequences provided in SEQ ID NOs: 4-26, wherein X is any amino acid change. In some embodiments, the nuclease-inactive dCas9 domain comprises a D10A mutation and a H840A mutation of the amino acid sequence set forth in SEQ ID NO: 6, or a corresponding mutation in any Cas9 provided herein, such as any one of the amino acid sequences provided in SEQ ID NOs: 4-26. As one example, a nuclease-inactive Cas9 domain comprises the amino acid sequence set forth in SEQ ID NO: 9 (Cloning vector pPlatTET-gRNA2, Accession No. BAV54124).

(SEQ ID NO: 9)
MDKKYSIGLAIGTNSVGWAVITDEYKVPSKKFKVLGNTDRHSIKKNLIGALLFDS
GETAEATRLKRTARRRYTRRKNRICYLQEIFSNEMAKVDDSFFHRLEESFLVEEDKKHERHPI
FGNIVDEVAYHEKYPTIYHLRKKLVDSTDKADLRLIYLALAHMIKFRGHFLIEGDLNPDNSDV
DKLFIQLVQTYNQLFEENPINASGVDAKAILSARLSKSRRLENLIAQLPGEKKNGLFGNLIALS
LGLTPNFKSNFDLAEDAKLQLSKDTYDDDLDNLLAQIGDQYADLFLAAKNLSDAILLSDILR
VNTEITKAPLSASMIKRYDEHHQDLTLLKALVRQQLPEKYKEIFFDQSKNGYAGYIDGGASQ
EEFYKFIKPILEKMDGTEELLVKLNREDLLRKQRTFDNGSIPHQIHLGELHAILRRQEDFYPFL
KDNREKIEKILTFRIPYYVGPLARGNSRFAWMTRKSEETITPWNFEEVVDKGASAQSFIERMT
NFDKNLPNEKVLPKHSLLYEYFTVYNELTKVKYVTEGMRKPAFLSGEQKKAIVDLLFKTNR
KVTVKQLKEDYFKKIECFDSVEISGVEDRFNASLGTYHDLLKIIKDKDFLDNEENEDILEDIVL
TLTLFEDREMIEERLKTYAHLFDDKVMKQLKRRRYTGWGRLSRKLINGIRDKQSGKTILDFL
KSDGFANRNFMQLIHDDSLTFKEDIQKAQVSGQGDSLHEHIANLAGSPAIKKGILQTVKVVD
ELVKVMGRHKPENIVIEMARENQTTQKGQKNSRERMKRIEEGIKELGSQILKEHPVENTQLQ
NEKLYLYYLQNGRDMYVDQELDINRLSDYDVDAIVPQSFLKDDSIDNKVLTRSDKNRGKSD
NVPSEEVVKKMKNYWRQLLNAKLITQRKFDNLTKAERGGLSELDKAGFIKRQLVETRQITK
HVAQILDSRMNTKYDENDKLIREVKVITLKSKLVSDFRKDFQFYKVREINNYHHAHDAYLN
AVVGTALIKKYPKLESEFVYGDYKVYDVRKMIAKSEQEIGKATAKYFFYSNIMNFFKTEITLA
NGEIRKRPLIETNGETGEIVWDKGRDFATVRKVLSMPQVNIVKKTEVQTGGFSKESILPKRNS
DKLIARKKDWDPKKYGGFDSPTVAYSVLVVAKVEKGKSKKLKSVKELLGITIMERSSFEKNP
IDFLEAKGYKEVKKDLIIKLPKYSLFELENGRKRMLASAGELQKGNELALPSKYVNFLYLASH
YEKLKGSPEDNEQKQLFVEQHKHYLDEIIEQISEFSKRVILADANLDKVLSAYNKHRDKPIRE
QAENIIHLFTLTNLGAPAAFKYFDTTIDRKRYTSTKEVLDATLIHQSITGLYETRIDLSQLGGD;

see, e.g., Qi et al., “Repurposing CRISPR as an RNA-guided platform for sequence-specific control of gene expression.” Cell. 2013; 152(5):1173-83, the entire contents of which are incorporated herein by reference).

[0239] In some embodiments, the napDNAbp domain of any of the disclosed base editors comprises a dead S. pyogenes Cas9 (dSpCas9). In some embodiments, the napDNAbp domain of any of the disclosed based editors is comprises at least 80%, at least 85%, at least 90%, at least 95%, or at least 99% sequence identity to SEQ ID NO: 8 or 9. In some embodiments, the napDNAbp domain of any of the disclosed base editors comprises the amino acid sequence of SEQ ID NO: 8 or 9.

[0240] Additional suitable nuclease-inactive dCas9 domains will be apparent to those of skill in the art based on this disclosure and knowledge in the field, and are within the scope of this disclosure. Such additional exemplary suitable nuclease-inactive Cas9 domains include, but are not limited to, D10A/H840A, D10A/D839A/H840A, and D10A/D839A/H840A/N863A mutant domains (See, e.g., Prashant et al., CAS9 transcriptional activators for target specificity screening and paired nickases for cooperative genome engineering. Nature Biotechnology. 2013; 31(9): 833-838, the entire contents of which are incorporated herein by reference). In some embodiments the dCas9 domain comprises an amino acid sequence that is at least 60%, at least 65%, at least 70%, at least 75%, at least 80%, at least 85%, at least 90%, at least 95%, at least 96%, at least 97%, at least 98%, at least 99%, or at least 99.5% identical to any one of the dCas9 domains provided herein. In some embodiments, the Cas9 domain comprises an amino acid sequences that has 1,2, 3,4, 5, 6,7, 8, 9, 10, 11, 12, 13, 14, 15, 16, 17, 18, 19, 20, 21, 22, 21, 24, 25, 26, 27, 28, 29, 30, 31, 32, 33, 34, 35, 36, 37, 38, 39, 40, 41, 42, 43, 44, 45, 46, 47, 48, 49, 50, or more mutations compared to any one of the amino acid sequences set forth in SEQ ID NOs: 7, 8, 9, or 22. In some embodiments, the Cas9 domain comprises an amino acid sequence that has at least 10, at least 15, at least 20, at least 30, at least 40, at least 50, at least 60, at least 70, at least 80, at least 90, at least 100, at least 150, at least 200, at least 250, at least 300, at least 350, at least 400, at least 500, at least 600, at least 700, at least 800, at least 900, at least 1000, at least 1100, or at least 1200 identical contiguous amino acid residues as compared to any one of the amino acid sequences set forth in SEQ ID NOs: 7, 8, 9, or 22.

[0241] In some embodiments, the disclosed CGBEs may comprise a napDNAbp domain that comprises a nickase. In some embodiments, the CGBEs described herein comprise a Cas9 nickase. The term “Cas9 nickase” of “nCas9” refers to a variant of Cas9 which is capable of introducing a single-strand break in a double strand DNA molecule target. In some embodiments, the Cas9 nickase comprises only a single functioning nuclease domain. The wild type Cas9 (e.g., the canonical SpCas9) comprises two separate nuclease domains, namely, the RuvC domain (which cleaves the non-protospacer DNA strand) and HNH domain (which cleaves the protospacer DNA strand). In one embodiment, the Cas9 nickase comprises a mutation in the RuvC domain which inactivates the RuvC nuclease activity. For example, mutations in aspartate (D) 10, histidine (H) 983, aspartate (D) 986, or glutamate (E) 762, have been reported as loss-of-function mutations of the RuvC nuclease domain and the creation of a functional Cas9 nickase (e.g., Nishimasu et al., “Crystal structure of Cas9 in complex with guide RNA and target DNA,” Cell 156(5), 935-949, which is incorporated herein by reference). Thus, nickase mutations in the RuvC domain could include D10X, H983X, D986X, or E762X, wherein X is any amino acid other than the wild type amino acid. In certain embodiments, the nickase could be D10A, of H983A, or D986A, or E762A, or a combination thereof.

[0242] In some embodiments, the Cas9 domain is a Cas9 nickase. The Cas9 nickase may be a Cas9 protein that is capable of cleaving only one strand of a duplexed nucleic acid molecule (e.g., a duplexed DNA molecule). In some embodiments the Cas9 nickase cleaves the target strand of a duplexed nucleic acid molecule, meaning that the Cas9 nickase cleaves the strand that is base paired to (complementary to) a gRNA (e.g., an sgRNA) that is bound to the Cas9. In some embodiments, a Cas9 nickase comprises a D10A mutation and has a histidine at position 840 of SEQ ID NO: 6, or a mutation in any Cas9 provided herein, such as any one of SEQ ID NOs: 4-26. For example, a Cas9 nickase may comprise the amino acid sequence as set forth in SEQ ID NO: 10, 13, 16, or 21. In some embodiments, the Cas9 nickase cleaves the non-target, non-base-edited strand of a duplexed nucleic acid molecule, meaning that the Cas9 nickase cleaves the strand that is not base paired to a gRNA (e.g., an sgRNA) that is bound to the Cas9. In some embodiments, a Cas9 nickase comprises an H840A mutation and has an aspartic acid residue at position 10 of SEQ ID NO: 6, or a corresponding mutation in any Cas9 provided herein, such as any one of SEQ ID NOs: 4-26. In some embodiments the Cas9 nickase comprises an amino acid sequence that is at least 60%, at least 65%, at least 70%, at least 75%, at least 80%, at least 85%, at least 90%, at least 95%, at least 96%, at least 97%, at least 98%, at least 99%, or at least 99.5% identical to any one of the Cas9 nickases provided herein. Additional suitable Cas9 nickases will be apparent to those of skill in the art based on this disclosure and knowledge in the field, and are within the scope of this disclosure.

[0243] In some embodiments, the napDNAbp domain of any of the disclosed base editors comprises an S. pyogenes Cas9 nickase (SpCas9n). In some embodiments, the napDNAbp domain of any of the disclosed based editors is comprises at least 80%, at least 85%, at least 90%, at least 95%, or at least 99% sequence identity to SEQ ID NO: 10 or 16. In some embodiments, the napDNAbp domain of any of the disclosed base editors comprises the amino acid sequence of SEQ ID NO: 10 or 16.

[0244] In some embodiments, the napDNAbp domain of any of the disclosed base editors comprises an S. aureus Cas9 nickase (SaCas9n). In some embodiments, the napDNAbp domain of any of the disclosed based editors is comprises at least 80%, at least 85%, at least 90%, at least 95%, or at least 99% sequence identity to SEQ ID NO: 13. In some embodiments, the napDNAbp domain of any of the disclosed base editors comprises the amino acid sequence of SEQ ID NO: 13.

Cas9 Domains with Reduced PAM Exclusivity

[0245] Some aspects of the disclosure provide Cas9 domains that have different PAM specificities. Typically, Cas9 proteins, such as Cas9 from S. pyogenes (spCas9), require a canonical NGG PAM sequence to bind a particular nucleic acid region, where the “N” in “NGG” is adenine (A), thymine (T), guanine (G), or cytosine (C), and the G is guanine. This may limit the ability to edit desired bases within a genome. In some embodiments, the base editing fusion proteins provided herein need to be positioned at a precise location, for example, where a target base is within a 4 base region (e.g., a “deamination window”), which is approximately 15 bases upstream of the PAM. See Komor, A. C., et al., “Programmable editing of a target base in genomic DNA without double-stranded DNA cleavage” Nature 533, 420-424 (2016), the entire contents of which are hereby incorporated by reference. In some embodiments, the deamination window is within a 2, 3, 4, 5, 6, 7, 8, 9, or 10 base region. In some embodiments, the deamination window is 5, 6, 7, 8, 9, 10, 11, 12, 13, 14, 15, 16, 17, 18, 19, 20, 21, 22, 23, 24, or 25 bases upstream of the PAM. Accordingly, in some embodiments, any of the fusion proteins provided herein may contain a Cas9 domain that is capable of binding a nucleotide sequence that does not contain a canonical (e.g., NGG) PAM sequence. Cas9 domains that bind to non-canonical PAM sequences have been described in the art and would be apparent to the skilled artisan. For example, Cas9 domains that bind non-canonical PAM sequences have been described in Kleinstiver, B. P., et al., “Engineered CRISPR-Cas9 nucleases with altered PAM specificities” Nature 523, 481-485 (2015); and Kleinstiver, B. P., et al., “Broadening the targeting range of Staphylococcus aureus CRISPR-Cas9 by modifying PAM recognition” Nature Biotechnology 33, 1293-1298 (2015); the entire contents of each are hereby incorporated by reference.

[0246] In some embodiments, the Cas9 domain is a Cas9 domain from Staphylococcus aureus (SaCas9). In some embodiments, the SaCas9 domain is a nuclease active SaCas9, a nuclease inactive SaCas9 (SaCas9d), or a SaCas9 nickase (SaCas9n). In some embodiments, the SaCas9 comprises the amino acid sequence SEQ ID NO: 12. In some embodiments, the SaCas9 comprises a N579X mutation of SEQ ID NO: 12, or a corresponding mutation in any of the amino acid sequences provided in SEQ ID NOs: 13-14, wherein X is any amino acid except for N. In some embodiments, the SaCas9 comprises a N579A mutation of SEQ ID NO: 12, or a corresponding mutation in any of the amino acid sequences provided in SEQ ID NOs: 13-14.

[0247] In some embodiments, the SaCas9 domain, the SaCas9d domain, or the SaCas9n domain can bind to a nucleic acid sequence having a non-canonical PAM. In some embodiments, the SaCas9 domain, the SaCas9d domain, or the SaCas9n domain can bind to a nucleic acid sequence having a NNGRRT (SEQ ID NO: 223) PAM sequence, where N=A, T, C, or G, and R=A or G. In some embodiments, the SaCas9 domain comprises one or more of E781X, N967X, and R1014X mutation of SEQ ID NO: 12, or a corresponding mutation in any of the amino acid sequences provided in SEQ ID NOs: 13-14, wherein X is any amino acid. In some embodiments, the SaCas9 domain comprises one or more of a E781K, a N967K, and a R1014H mutation of SEQ ID NO: 12, or one or more corresponding mutation in any of the amino acid sequences provided in SEQ ID NOs: 13-14. In some embodiments, the SaCas9 domain comprises a E781K, a N967K, or a R1014H mutation of SEQ ID NO: 12, or corresponding mutations in any of the amino acid sequences provided in SEQ ID NOs: 13-14.

[0248] In some embodiments, the Cas9 domain of any of the fusion proteins provided herein comprises an amino acid sequence that is at least 60%, at least 65%, at least 70%, at least 75%, at least 80%, at least 85%, at least 90%, at least 95%, at least 96%, at least 97%, at least 98%, at least 99%, or at least 99.5% identical to any one of SEQ ID NOs: 12-14. In some embodiments, the Cas9 domain of any of the fusion proteins provided herein comprises the amino acid sequence of any one of SEQ ID NOs: 12-14. In some embodiments, the Cas9 domain of any of the fusion proteins provided herein consists of the amino acid sequence of any one of SEQ ID NOs: 12-14.

### Exemplary SaCas9 Sequence

(SEQ ID NO: 12)
KRNYILGLDIGITSVGYGIIDYETRDVIDAGVRLFKEANVENNEGRRSKRGARRLKRR
RRHRIQRVKKLLFDYNLLTDHSELSGINPYEARVKGLSQKLSEEEFSAALLHLAKRRG
VHNVNEVEEDTGNELSTKEQISRNSKALEEKYVAELQLERLKKDGEVRGSINRFKTS
DYVKEAKQLLKVQKAYHQLDQSFIDTYIDLLETRRTYYEGPGEGSPFGWKDIKEWY
EMLMGHCTYFPEELRSVKYAYNADLYNALNDLNNLVITRDENEKLEYYEKFQIIENV
FKQKKKPTLKQIAKEILVNEEDIKGYRVTSTGKPEFTNLKVYHDIKDITARKEIIENAE
LLDQIAKILTIYQSSEDIQEELTNLNSELTQEEIEQISNLKGYTGTHNLSLKAINLILDEL
WHTNDNQIAIFNRLKLVPKKVDLSQQKEIPTTLVDDFILSPVVKRSFIQSIKVINAIIKK
YGLPNDIIIELAREKNSKDAQKMINEMQKRNRQTNERIEEIIRTTGKENAKYLIEKIKL
HDMQEGKCLYSLEAIPLEDLLNNPFNYEVDHIIPRSVSFDNSFNNKVLVKQEENSKK
GNRTPFQYLSSSDSKISYETFKKHILNLAKGKGRISKTKKEYLLEERDINRFSVQKDFI
NRNLVDTRYATRGLMNLLRSYFRVNNLDVKVKSINGGFTSFLRRKWKFKKERNKG
YKHHAEDALIIANADFIFKEWKKLDKAKKVMENQMFEEKQAESMPEIETEQEYKEIF
ITPHQIKHIKDFKDYKYSHRVDKKPNRELINDTLYSTRKDDKGNTLIVNNLNGLYDK
DNDKLKKLINKSPEKLLMYHHDPQTYQKLKLIMEQYGDEKNPLYKYYEETGNYLTK
YSKKDNGPVIKKIKYYGNKLNAHLDITDDYPNSRNKVVKLSLKPYRFDVYLDNGVY
KFVTVKNLDVIKKENYYEVNSKCYEEAKKLKKISNQAEFIASFYNNDLIKINGELYRV
IGVNNDLLNRIEVNMIDITYREYLENMNDKRPPRIIKTIASKTQSIKKYSTDILGNLYE
VKSKKHPQIIKKG

[0250] Residue N579 of SEQ ID NO: 12, which is underlined and in bold, may be mutated (e.g., to a A579) to yield a SaCas9 nickase.

### Exemplary SaCas9n Sequence

(SEQ ID NO: 13)
KRNYILGLDIGITSVGYGIIDYETRDVIDAGVRLFKEANVENNEGRRSKRGARRLKRRRRHRI
QRVKKLLFDYNLLTDHSELSGINPYEARVKGLSQKLSEEEFSAALLHLAKRRGVHNVNEVEE
DTGNELSTKEQISRNSKALEEKYVAELQLERLKKDGEVRGSINRFKTSDYVKEAKQLLKVQK
AYHQLDQSFIDTYIDLLETRRTYYEGPGEGSPFGWKDIKEWYEMLMGHCTYFPEELRSVKYA
YNADLYNALNDLNNLVITRDENEKLEYYEKFQIIENVFKQKKKPTLKQIAKEILVNEEDIKGY
RVTSTGKPEFTNLKVYHDIKDITARKEIIENAELLDQIAKILTIYQSSEDIQEELTNLNSELTQEE
IEQISNLKGYTGTHNLSLKAINLILDELWHTNDNQIAIFNRLKLVPKKVDLSQQKEIPTTLVDD
FILSPVVKRSFIQSIKVINAIIKKYGLPNDIIIELAREKNSKDAQKMINEMQKRNRQTNERIEEIIR
TTGKENAKYLIEKIKLHDMQEGKCLYSLEAIPLEDLLNNPFNYEVDHIIPRSVSFDNSFNNKVL
VKQEEASKKGNRTPFQYLSSSDSKISYETFKKHILNLAKGKGRISKTKKEYLLEERDINRFSVQ
KDFINRNLVDTRYATRGLMNLLRSYFRVNNLDVKVKSINGGFTSFLRRKWKFKKERNKGYK
HHAEDALIIANADFIFKEWKKLDKAKKVMENQMFEEKQAESMPEIETEQEYKEIFITPHQIKHI
KDFKDYKYSHRVDKKPNRELINDTLYSTRKDDKGNTLIVNNLNGLYDKDNDKLKKLINKSP
EKLLMYHHDPQTYQKLKLIMEQYGDEKNPLYKYYEETGNYLTKYSKKDNGPVIKKIKYYGN
KLNAHLDITDDYPNSRNKVVKLSLKPYRFDVYLDNGVYKFVTVKNLDVIKKENYYEVNSKC
YEEAKKLKKISNQAEFIASFYNNDLIKINGELYRVIGVNNDLLNRIEVNMIDITYREYLENMN
DKRPPRIIKTIASKTQSIKKYSTDILGNLYEVKSKKHPQIIKKG.

[0252] Residue A579 of SEQ ID NO: 13, which can be mutated from N579 of SEQ ID NO: 12 to yield a SaCas9 nickase, is underlined and in bold.

(SEQ ID NO: 14)
KRNYILGLDIGITSVGYGIIDYETRDVIDAGVRLFKEANVENNEGRRSKRGARRLKRRRRHRI
QRVKKLLFDYNLLTDHSELSGINPYEARVKGLSQKLSEEEFSAALLHLAKRRGVHNVNEVEE
DTGNELSTKEQISRNSKALEEKYVAELQLERLKKDGEVRGSINRFKTSDYVKEAKQLLKVQK
AYHQLDQSFIDTYIDLLETRRTYYEGPGEGSPFGWKDIKEWYEMLMGHCTYFPEELRSVKYA
YNADLYNALNDLNNLVITRDENEKLEYYEKFQIIENVFKQKKKPTLKQIAKEILVNEEDIKGY
RVTSTGKPEFTNLKVYHDIKDITARKEIIENAELLDQIAKILTIYQSSEDIQEELTNLNSELTQEE
IEQISNLKGYTGTHNLSLKAINLILDELWHTNDNQIAIFNRLKLVPKKVDLSQQKEIPTTLVDD
FILSPVVKRSFIQSIKVINAIIKKYGLPNDIIIELAREKNSKDAQKMINEMQKRNRQTNERIEEIIR
TTGKENAKYLIEKIKLHDMQEGKCLYSLEAIPLEDLLNNPFNYEVDHIIPRSVSFDNSFNNKVL
VKQEEASKKGNRTPFQYLSSSDSKISYETFKKHILNLAKGKGRISKTKKEYLLEERDINRFSVQ
KDFINRNLVDTRYATRGLMNLLRSYFRVNNLDVKVKSINGGFTSFLRRKWKFKKERNKGYK
HHAEDALIIANADFIFKEWKKLDKAKKVMENQMFEEKQAESMPEIETEQEYKEIFITPHQIKHI
KDFKDYKYSHRVDKKPNRKLINDTLYSTRKDDKGNTLIVNNLNGLYDKDNDKLKKLINKSP
EKLLMYHHDPQTYQKLKLIMEQYGDEKNPLYKYYEETGNYLTKYSKKDNGPVIKKIKYYGN
KLNAHLDITDDYPNSRNKVVKLSLKPYRFDVYLDNGVYKFVTVKNLDVIKKENYYEVNSKC
YEEAKKLKKISNQAEFIASFYKNDLIKINGELYRVIGVNNDLLNRIEVNMIDITYREYLENMN
DKRPPHIIKTIASKTQSIKKYSTDILGNLYEVKSKKHPQIIKKG.

[0253] Residue A579 of SEQ ID NO: 14, which can be mutated from N579 of SEQ ID NO: 12 to yield a SaCas9 nickase, is underlined and in bold. Residues K781, K967, and H1014 of SEQ ID NO: 14, which can be mutated from E781, N967, and R1014 of SEQ ID NO: 12 to yield a SaKKH Cas9 are underlined and in italics.

[0254] In some embodiments, the Cas9 domain is a Cas9 domain from Streptococcus pyogenes (SpCas9). In some embodiments, the SpCas9 domain is a nuclease active SpCas9, a nuclease inactive SpCas9 (SpCas9d), or a SpCas9 nickase (SpCas9n). In some embodiments, the SpCas9 comprises the amino acid sequence SEQ ID NO: 15. In some embodiments, the SpCas9 comprises a D9X mutation of SEQ ID NO: 15, or a corresponding mutation in any Cas9, such as any of the amino acid sequences provided in SEQ ID NOs: 4-26, wherein X is any amino acid except for D. In some embodiments, the SpCas9 comprises a D9A mutation of SEQ ID NO: 15, or a corresponding mutation in any Cas9 provided herein, such as any of the amino acid sequences provided in SEQ ID NOs: 4-26. In some embodiments, the SpCas9 domain, the SpCas9d domain, or the SpCas9n domain can bind to a nucleic acid sequence having a non-canonical PAM. In some embodiments, the SpCas9 domain, the SpCas9d domain, or the SpCas9n domain can bind to a nucleic acid sequence having a NGG, a NGA, or a NGCG PAM sequence. In some embodiments, the SpCas9 domain comprises one or more of a D1134X, a R1334X, and a T1336X mutation of SEQ ID NO: 15, or a corresponding mutation in any Cas9 provided herein, such as any of the amino acid sequences provided in SEQ ID NOs: 4-26, wherein X is any amino acid. In some embodiments, the SpCas9 domain comprises one or more of a D1134E, R1334Q, and T1336R mutation of SEQ ID NO: 15, or a corresponding mutation in any Cas9 provided herein, such as any of the amino acid sequences provided in SEQ ID NOs: 4-26. In some embodiments, the SpCas9 domain comprises a D1 134E, a R1334Q, and a T1336R mutation of SEQ ID NO: 15, or corresponding mutations in any Cas9 provided herein, such as any of the amino acid sequences provided in SEQ ID NOs: 4-26. In some embodiments, the SpCas9 domain comprises one or more of a D1134X, a R1334X, and a T1336X mutation of SEQ ID NO: 15, or a corresponding mutation in any Cas9 provided herein, such as any of the amino acid sequences provided in SEQ ID NOs: 4-26, wherein X is any amino acid. In some embodiments, the SpCas9 domain comprises one or more of a D1134V, a R1334Q, and a T1336R mutation of SEQ ID NO: 15, or a corresponding mutation in any Cas9 provided herein, such as any of the amino acid sequences provided in SEQ ID NOs: 4-26. In some embodiments, the SpCas9 domain comprises a D1 134V, a R1334Q, and a T1336R mutation of SEQ ID NO: 15, or corresponding mutations in any Cas9 provided herein, such as any of the amino acid sequences provided in SEQ ID NOs: 4-26. In some embodiments, the SpCas9 domain comprises one or more of a D1134X, a G1217X, a R1334X, and a T1336X mutation of SEQ ID NO: 15, or a corresponding mutation in any Cas9 provided herein, such as any one of the amino acid sequences provided in SEQ ID NOs: 4-26, wherein X is any amino acid. In some embodiments, the SpCas9 domain comprises one or more of a D1134V, a G1217R, a R1334Q, and a T1336R mutation of SEQ ID NO: 15, or a corresponding mutation in any Cas9 provided herein, such as any of the amino acid sequences provided in SEQ ID NOs: 4-26. In some embodiments, the SpCas9 domain comprises a D1134V, a G1217R, a R1334Q, and a T1336R mutation of SEQ ID NO: 15, or corresponding mutations in any Cas9 provided herein, such as any one of the amino acid sequences provided in SEQ ID NOs: 4-26.

[0255] In some embodiments, the Cas9 domain of any of the fusion proteins provided herein comprises an amino acid sequence that is at least 60%, at least 65%, at least 70%, at least 75%, at least 80%, at least 85%, at least 90%, at least 95%, at least 96%, at least 97%, at least 98%, at least 99%, or at least 99.5% identical to any one of SEQ ID NOs: 15-19. In some embodiments, the Cas9 domain of any of the fusion proteins provided herein comprises the amino acid sequence of any one of SEQ ID NOs: 15-19. In some embodiments, the Cas9 domain of any of the fusion proteins provided herein consists of the amino acid sequence of any one of SEQ ID NOs: 15-19.

### Exemplary SpCas9

(SEQ ID NO: 15)
DKKYSIGLDIGTNSVGWAVITDEYKVPSKKFKVLGNTDRHSIKKNLIGALLFDSGETAEATRL
KRTARRRYTRRKNRICYLQEIFSNEMAKVDDSFFHRLEESFLVEEDKKHERHPIFGNIVDEVA
YHEKYPTIYHLRKKLVDSTDKADLRLIYLALAHMIKFRGHFLIEGDLNPDNSDVDKLFIQLVQ
TYNQLFEENPINASGVDAKAILSARLSKSRRLENLIAQLPGEKKNGLFGNLIALSLGLTPNFKS
NFDLAEDAKLQLSKDTYDDDLDNLLAQIGDQYADLFLAAKNLSDAILLSDILRVNTEITKAPL
SASMIKRYDEHHQDLTLLKALVRQQLPEKYKEIFFDQSKNGYAGYIDGGASQEEFYKFIKPIL
EKMDGTEELLVKLNREDLLRKQRTFDNGSIPHQIHLGELHAILRRQEDFYPFLKDNREKIEKIL
TFRIPYYVGPLARGNSRFAWMTRKSEETITPWNFEEVVDKGASAQSFIERMTNFDKNLPNEK
VLPKHSLLYEYFTVYNELTKVKYVTEGMRKPAFLSGEQKKAIVDLLFKTNRKVTVKQLKED
YFKKIECFDSVEISGVEDRFNASLGTYHDLLKIIKDKDFLDNEENEDILEDIVLTLTLFEDREMI
EERLKTYAHLFDDKVMKQLKRRRYTGWGRLSRKLINGIRDKQSGKTILDFLKSDGFANRNF
MQLIHDDSLTFKEDIQKAQVSGQGDSLHEHIANLAGSPAIKKGILQTVKVVDELVKVMGRHK
PENIVIEMARENQTTQKGQKNSRERMKRIEEGIKELGSQILKEHPVENTQLQNEKLYLYYLQN
GRDMYVDQELDINRLSDYDVDHIVPQSFLKDDSIDNKVLTRSDKNRGKSDNVPSEEVVKKM
KNYWRQLLNAKLITQRKFDNLTKAERGGLSELDKAGFIKRQLVETRQITKHVAQILDSRMNT
KYDENDKLIREVKVITLKSKLVSDFRKDFQFYKVREINNYHHAHDAYLNAVVGTALIKKYPK
LESEFVYGDYKVYDVRKMIAKSEQEIGKATAKYFFYSNIMNFFKTEITLANGEIRKRPLIETNG
ETGEIVWDKGRDFATVRKVLSMPQVNIVKKTEVQTGGFSKESILPKRNSDKLIARKKDWDPK
KYGGFDSPTVAYSVLVVAKVEKGKSKKLKSVKELLGITIMERSSFEKNPIDFLEAKGYKEVK
KDLIIKLPKYSLFELENGRKRMLASAGELQKGNELALPSKYVNFLYLASHYEKLKGSPEDNE
QKQLFVEQHKHYLDEIIEQISEFSKRVILADANLDKVLSAYNKHRDKPIREQAENIIHLFTLTN
LGAPAAFKYFDTTIDRKRYTSTKEVLDATLIHQSITGLYETRIDLSQLGGD

### Exemplary SpCas9n

(SEQ ID NO: 16)
DKKYSIGLAIGTNSVGWAVITDEYKVPSKKFKVLGNTDRHSIKKNLIGALLFDSGETAEATRL
KRTARRRYTRRKNRICYLQEIFSNEMAKVDDSFFHRLEESFLVEEDKKHERHPIFGNIVDEVA
YHEKYPTIYHLRKKLVDSTDKADLRLIYLALAHMIKFRGHFLIEGDLNPDNSDVDKLFIQLVQ
TYNQLFEENPINASGVDAKAILSARLSKSRRLENLIAQLPGEKKNGLFGNLIALSLGLTPNFKS
NFDLAEDAKLQLSKDTYDDDLDNLLAQIGDQYADLFLAAKNLSDAILLSDILRVNTEITKAPL
SASMIKRYDEHHQDLTLLKALVRQQLPEKYKEIFFDQSKNGYAGYIDGGASQEEFYKFIKPIL
EKMDGTEELLVKLNREDLLRKQRTFDNGSIPHQIHLGELHAILRRQEDFYPFLKDNREKIEKIL
TFRIPYYVGPLARGNSRFAWMTRKSEETITPWNFEEVVDKGASAQSFIERMTNFDKNLPNEK
VLPKHSLLYEYFTVYNELTKVKYVTEGMRKPAFLSGEQKKAIVDLLFKTNRKVTVKQLKED
YFKKIECFDSVEISGVEDRFNASLGTYHDLLKIIKDKDFLDNEENEDILEDIVLTLTLFEDREMI
EERLKTYAHLFDDKVMKQLKRRRYTGWGRLSRKLINGIRDKQSGKTILDFLKSDGFANRNF
MQLIHDDSLTFKEDIQKAQVSGQGDSLHEHIANLAGSPAIKKGILQTVKVVDELVKVMGRHK
PENIVIEMARENQTTQKGQKNSRERMKRIEEGIKELGSQILKEHPVENTQLQNEKLYLYYLQN
GRDMYVDQELDINRLSDYDVDHIVPQSFLKDDSIDNKVLTRSDKNRGKSDNVPSEEVVKKM
KNYWRQLLNAKLITQRKFDNLTKAERGGLSELDKAGFIKRQLVETRQITKHVAQILDSRMNT
KYDENDKLIREVKVITLKSKLVSDFRKDFQFYKVREINNYHHAHDAYLNAVVGTALIKKYPK
LESEFVYGDYKVYDVRKMIAKSEQEIGKATAKYFFYSNIMNFFKTEITLANGEIRKRPLIETNG
ETGEIVWDKGRDFATVRKVLSMPQVNIVKKTEVQTGGFSKESILPKRNSDKLIARKKDWDPK
KYGGFDSPTVAYSVLVVAKVEKGKSKKLKSVKELLGITIMERSSFEKNPIDFLEAKGYKEVK
KDLIIKLPKYSLFELENGRKRMLASAGELQKGNELALPSKYVNFLYLASHYEKLKGSPEDNE
QKQLFVEQHKHYLDEIIEQISEFSKRVILADANLDKVLSAYNKHRDKPIREQAENIIHLFTLTN
LGAPAAFKYFDTTIDRKRYTSTKEVLDATLIHQSITGLYETRIDLSQLGGD

### Exemplary SpEQR Cas9

(SEQ ID NO: 17)
DKKYSIGLAIGTNSVGWAVITDEYKVPSKKFKVLGNTDRHSIKKNLIGALLFDSGETAEATRL
KRTARRRYTRRKNRICYLQEIFSNEMAKVDDSFFHRLEESFLVEEDKKHERHPIFGNIVDEVA
YHEKYPTIYHLRKKLVDSTDKADLRLIYLALAHMIKFRGHFLIEGDLNPDNSDVDKLFIQLVQ
TYNQLFEENPINASGVDAKAILSARLSKSRRLENLIAQLPGEKKNGLFGNLIALSLGLTPNFKS
NFDLAEDAKLQLSKDTYDDDLDNLLAQIGDQYADLFLAAKNLSDAILLSDILRVNTEITKAPL
SASMIKRYDEHHQDLTLLKALVRQQLPEKYKEIFFDQSKNGYAGYIDGGASQEEFYKFIKPIL
EKMDGTEELLVKLNREDLLRKQRTFDNGSIPHQIHLGELHAILRRQEDFYPFLKDNREKIEKIL
TFRIPYYVGPLARGNSRFAWMTRKSEETITPWNFEEVVDKGASAQSFIERMTNFDKNLPNEK
VLPKHSLLYEYFTVYNELTKVKYVTEGMRKPAFLSGEQKKAIVDLLFKTNRKVTVKQLKED
YFKKIECFDSVEISGVEDRFNASLGTYHDLLKIIKDKDFLDNEENEDILEDIVLTLTLFEDREMI
EERLKTYAHLFDDKVMKQLKRRRYTGWGRLSRKLINGIRDKQSGKTILDFLKSDGFANRNF
MQLIHDDSLTFKEDIQKAQVSGQGDSLHEHIANLAGSPAIKKGILQTVKVVDELVKVMGRHK
PENIVIEMARENQTTQKGQKNSRERMKRIEEGIKELGSQILKEHPVENTQLQNEKLYLYYLQN
GRDMYVDQELDINRLSDYDVDHIVPQSFLKDDSIDNKVLTRSDKNRGKSDNVPSEEVVKKM
KNYWRQLLNAKLITQRKFDNLTKAERGGLSELDKAGFIKRQLVETRQITKHVAQILDSRMNT
KYDENDKLIREVKVITLKSKLVSDFRKDFQFYKVREINNYHHAHDAYLNAVVGTALIKKYPK
LESEFVYGDYKVYDVRKMIAKSEQEIGKATAKYFFYSNIMNFFKTEITLANGEIRKRPLIETNG
ETGEIVWDKGRDFATVRKVLSMPQVNIVKKTEVQTGGFSKESILPKRNSDKLIARKKDWDPK
KYGGFESPTVAYSVLVVAKVEKGKSKKLKSVKELLGITIMERSSFEKNPIDFLEAKGYKEVK
KDLIIKLPKYSLFELENGRKRMLASAGELQKGNELALPSKYVNFLYLASHYEKLKGSPEDNE
QKQLFVEQHKHYLDEIIEQISEFSKRVILADANLDKVLSAYNKHRDKPIREQAENIIHLFTLTN
LGAPAAFKYFDTTIDRKQYRSTKEVLDATLIHQSITGLYETRIDLSQLGGD

[0259] Residues E1134, Q1334, and R1336 of SEQ ID NO: 17, which can be mutated from D1134, R1334, and T1336 of SEQ ID NO: 15 to yield a SpEQR Cas9, are underlined and in bold.

### Exemplary SpVQR Cas9

(SEQ ID NO: 18)
DKKYSIGLAIGTNSVGWAVITDEYKVPSKKFKVLGNTDRHSIKKNLIGALLFDSGETAEATRL
KRTARRRYTRRKNRICYLQEIFSNEMAKVDDSFFHRLEESFLVEEDKKHERHPIFGNIVDEVA
YHEKYPTIYHLRKKLVDSTDKADLRLIYLALAHMIKFRGHFLIEGDLNPDNSDVDKLFIQLVQ
TYNQLFEENPINASGVDAKAILSARLSKSRRLENLIAQLPGEKKNGLFGNLIALSLGLTPNFKS
NFDLAEDAKLQLSKDTYDDDLDNLLAQIGDQYADLFLAAKNLSDAILLSDILRVNTEITKAPL
SASMIKRYDEHHQDLTLLKALVRQQLPEKYKEIFFDQSKNGYAGYIDGGASQEEFYKFIKPIL
EKMDGTEELLVKLNREDLLRKQRTFDNGSIPHQIHLGELHAILRRQEDFYPFLKDNREKIEKIL
TFRIPYYVGPLARGNSRFAWMTRKSEETITPWNFEEVVDKGASAQSFIERMTNFDKNLPNEK
VLPKHSLLYEYFTVYNELTKVKYVTEGMRKPAFLSGEQKKAIVDLLFKTNRKVTVKQLKED
YFKKIECFDSVEISGVEDRFNASLGTYHDLLKIIKDKDFLDNEENEDILEDIVLTLTLFEDREMI
EERLKTYAHLFDDKVMKQLKRRRYTGWGRLSRKLINGIRDKQSGKTILDFLKSDGFANRNF
MQLIHDDSLTFKEDIQKAQVSGQGDSLHEHIANLAGSPAIKKGILQTVKVVDELVKVMGRHK
PENIVIEMARENQTTQKGQKNSRERMKRIEEGIKELGSQILKEHPVENTQLQNEKLYLYYLQN
GRDMYVDQELDINRLSDYDVDHIVPQSFLKDDSIDNKVLTRSDKNRGKSDNVPSEEVVKKM
KNYWRQLLNAKLITQRKFDNLTKAERGGLSELDKAGFIKRQLVETRQITKHVAQILDSRMNT
KYDENDKLIREVKVITLKSKLVSDFRKDFQFYKVREINNYHHAHDAYLNAVVGTALIKKYPK
LESEFVYGDYKVYDVRKMIAKSEQEIGKATAKYFFYSNIMNFFKTEITLANGEIRKRPLIETNG
ETGEIVWDKGRDFATVRKVLSMPQVNIVKKTEVQTGGFSKESILPKRNSDKLIARKKDWDPK
KYGGFVSPTVAYSVLVVAKVEKGKSKKLKSVKELLGITIMERSSFEKNPIDFLEAKGYKEVK
KDLIIKLPKYSLFELENGRKRMLASAGELQKGNELALPSKYVNFLYLASHYEKLKGSPEDNE
QKQLFVEQHKHYLDEIIEQISEFSKRVILADANLDKVLSAYNKHRDKPIREQAENIIHLFTLTN
LGAPAAFKYFDTTIDRKQYRSTKEVLDATLIHQSITGLYETRIDLSQLGGD

[0261] Residues V1134, Q1334, and R1336 of SEQ ID NO: 18, which can be mutated from D1134, R1334, and T1336 of SEQ ID NO: 15 to yield a SpVQR Cas9, are underlined and in bold.

### Exemplary SpVRER Cas9

(SEQ ID NO: 19)
DKKYSIGLAIGTNSVGWAVITDEYKVPSKKFKVLGNTDRHSIKKNLIGALLFDSGETAEATRL
KRTARRRYTRRKNRICYLQEIFSNEMAKVDDSFFHRLEESFLVEEDKKHERHPIFGNIVDEVA
YHEKYPTIYHLRKKLVDSTDKADLRLIYLALAHMIKFRGHFLIEGDLNPDNSDVDKLFIQLVQ
TYNQLFEENPINASGVDAKAILSARLSKSRRLENLIAQLPGEKKNGLFGNLIALSLGLTPNFKS
NFDLAEDAKLQLSKDTYDDDLDNLLAQIGDQYADLFLAAKNLSDAILLSDILRVNTEITKAPL
SASMIKRYDEHHQDLTLLKALVRQQLPEKYKEIFFDQSKNGYAGYIDGGASQEEFYKFIKPIL
EKMDGTEELLVKLNREDLLRKQRTFDNGSIPHQIHLGELHAILRRQEDFYPFLKDNREKIEKIL
TFRIPYYVGPLARGNSRFAWMTRKSEETITPWNFEEVVDKGASAQSFIERMTNFDKNLPNEK
VLPKHSLLYEYFTVYNELTKVKYVTEGMRKPAFLSGEQKKAIVDLLFKTNRKVTVKQLKED
YFKKIECFDSVEISGVEDRFNASLGTYHDLLKIIKDKDFLDNEENEDILEDIVLTLTLFEDREMI
EERLKTYAHLFDDKVMKQLKRRRYTGWGRLSRKLINGIRDKQSGKTILDFLKSDGFANRNF
MQLIHDDSLTFKEDIQKAQVSGQGDSLHEHIANLAGSPAIKKGILQTVKVVDELVKVMGRHK
PENIVIEMARENQTTQKGQKNSRERMKRIEEGIKELGSQILKEHPVENTQLQNEKLYLYYLQN
GRDMYVDQELDINRLSDYDVDHIVPQSFLKDDSIDNKVLTRSDKNRGKSDNVPSEEVVKKM
KNYWRQLLNAKLITQRKFDNLTKAERGGLSELDKAGFIKRQLVETRQITKHVAQILDSRMNT
KYDENDKLIREVKVITLKSKLVSDFRKDFQFYKVREINNYHHAHDAYLNAVVGTALIKKYPK
LESEFVYGDYKVYDVRKMIAKSEQEIGKATAKYFFYSNIMNFFKTEITLANGEIRKRPLIETNG
ETGEIVWDKGRDFATVRKVLSMPQVNIVKKTEVQTGGFSKESILPKRNSDKLIARKKDWDPK
KYGGFVSPTVAYSVLVVAKVEKGKSKKLKSVKELLGITIMERSSFEKNPIDFLEAKGYKEVK
KDLIIKLPKYSLFELENGRKRMLASARELQKGNELALPSKYVNFLYLASHYEKLKGSPEDNE
QKQLFVEQHKHYLDEIIEQISEFSKRVILADANLDKVLSAYNKHRDKPIREQAENIIHLFTLTN
LGAPAAFKYFDTTIDRKEYRSTKEVLDATLIHQSITGLYETRIDLSQLGGD

[0263] Residues V1134, R1217, Q1334, and R1336 of SEQ ID NO: 19, which can be mutated from D1134, G1217, R1334, and T1336 of SEQ ID NO: 15 to yield a SpVRER Cas9, are underlined and in bold.

[0264] In some embodiments, the disclosure provides napDNAbp domains that comprise SpCas9 variants that recognize and work best with NRRH, NRCH, and NRTH PAMs. See International Application No. PCT/US2019/47996, which published as International Publication No. WO 2020/041751 on Feb. 27, 2020, incorporated by reference herein. In some embodiments, the disclosed base editors comprise a napDNAbp domain selected from SpCas9-NRRH, SpCas9-NRTH, and SpCas9-NRCH.

[0265] In some embodiments, the disclosed base editors comprise a napDNAbp domain that has a sequence that is at least 90%, at least 95%, at least 98%, or at least 99% identical to SpCas9-NRRH. In some embodiments, the disclosed base editors comprise a napDNAbp domain that comprises SpCas9-NRRH. The SpCas9-NRRH has an amino acid sequence as presented in SEQ ID NO: 435 (underligned residues are mutated relative to SpCas9, as set

(SEQ ID NO: 435)
MDKKYSIGLDIGTNSVGWAVITDEYKVPSKKFKVLGNTDRHSIKKNLIGALLFDSGE
TAEATRLKRTARRRYTRRKNRICYLQEIFSNEMAKVDDSFFHRLEESFLVEEDKKHE
RHPIFGNIVDEVAYHEKYPTIYHLRKKLVDSTDKADLRLIYLALAHMIKFRGHFLIEG
DLNPDNSDVDKLFIQLVQTYNQLFEENPINASGVDAKAILSARLSKSRRLENLIAQLP
GEKKNGLFGNLIALSLGLTPNFKSNFDLAEDAKLQLSKDTYDDDLDNLLAQIGDQYA
DLFLAAKNLSDAILLSDILRVNTEITKAPLSASMVKRYDEHHQDLTLLKALVRQQLPE
KYKEIFFDQSKNGYAGYIDGGASQEEFYKFIKPILEKMDGTEELLVKLNREDLLRKQR
TFDNGIIPHQIHLGELHAILRRQGDFYPFLKDNREKIEKILTFRIPYYVGPLARGNSRFA
WMTRKSEETITPWNFEEVVDKGASAQSFIERMTNFDKNLPNEKVLPKHSLLYEYFTV
YNELTKVKYVTEGMRKPAFLSGEQKKAIVDLLFKTNRKVTVKQLKEDYFKKIECFD
SVEISGVEDRFNASLGTYHDLLKIIKDKDFLDNEENEDILEDIVLTLTLFEDREMIEERL
KTYAHLFDDKVMKQLKRLRYTGWGRLSRKLINGIRDKQSGKTILDFLKSDGFANRN
FMQLIHDDSLTFKEDIQKAQVSGQGDSLHEHIANLAGSPAIKKGILQTVKVVDELVK
VMGGHKPENIVIEMARENQTTQKGQKNSRERMKRIEEGIKELGSQILKEHPVENTQL
QNEKLYLYYLQNGRDMYVDQELDINRLSDYDVDHIVPQSFLKDDSIDNKVLTRSDK
NRGKSDNVPSEEVVKKMKNYWRQLLNAKLITQRKFDNLTKAERGGLSELDKAGFIK
RQLVETRQITKHVAQILDSRMNTKYDENDKLIREVKVITLKSKLVSDFRKDFQFYKV
REINNYHHAHDAYLNAVVGTALIKKYPKLESEFVYGDYKVYDVRKMIAKSEQEIGK
ATAKYFFYSNIMNFFKTEITLANGEIRKRPLIETNGETGEIVWDKGRDFATVRKVLSM
PQVNIVKKTEVQTGGFSKESILPKGNSDKLIARKKDWDPKKYGGFNSPTAAYSVLVV
AKVEKGKSKKLKSVKELLGITIMERSSFEKNPIGFLEAKGYKEVKKDLIIKLPKYSLFE
LENGRKRMLASAGVLHKGNELALPSKYVNFLYLASHYEKLKGSPEDNEQKQLFVEQ
HKHYLDEIIEQISEFSKRVILADANLDKVLSAYNKHRDKPIREQAENIIHLFTLTNLGV
PAAFKYFDTTIDKKRYTSTKEVLDATLIHQSITGLYETRIDLSQLGGD

[0266] In some embodiments, the disclosed base editors comprise a napDNAbp domain that has a sequence that is at least 90%, at least 95%, at least 98%, or at least 99% identical to SpCas9-NRCH. In some embodiments, the disclosed base editors comprise a napDNAbp domain that comprises SpCas9-NRCH. An example of an NRCH PAM is CACC (5′-CACC-3′). The SpCas9-NRCH has an amino acid sequence as presented in SEQ ID NO: 436 (underligned residues are mutated relative to SpCas9):

(SEQ ID NO: 436)
MDKKYSIGLDIGTNSVGWAVITDEYKVPSKKFKVLGNTDRHSIKKNLIGAL
LFDSGETAEATRLKRTARRRYTRRKNRICYLQEIFSNEMAKVDDSFFHRLEESFLVEE
DKKHERHPIFGNIVDEVAYHEKYPTIYHLRKKLVDSTDKADLRLIYLALAHMIKFRG
HFLIEGDLNPDNSDVDKLFIQLVQTYNQLFEENPINASGVDAKAILSARLSKSRRLEN
LIAQLPGEKKNGLFGNLIALSLGLTPNFKSNFDLAEDAKLQLSKDTYDDDLDNLLAQI
GDQYADLFLAAKNLSDAILLSDILRVNTEITKAPLSASMVKRYDEHHQDLTLLKALV
RQQLPEKYKEIFFDQSKNGYAGYIDGGASQEEFYKFIKPILEKMDGTEELLVKLNRED
LLRKQRTFDNGIIPHQIHLGELHAILRRQGDFYPFLKDNREKIEKILTFRIPYYVGPLAR
GNSRFAWMTRKSEETITPWNFEEVVDKGASAQSFIERMTNFDKNLPNEKVLPKHSLL
YEYFTVYNELTKVKYVTEGMRKPAFLSGEQKKAIVDLLFKTNRKVTVKQLKEDYFK
KIECFDSVEISGVEDRFNASLGTYHDLLKIIKDKDFLDNEENEDILEDIVLTLTLFEDRE
MIEERLKTYAHLFDDKVMKQLKRLRYTGWGRLSRKLINGIRDKQSGKTILDFLKSDG
FANRNFMQLIHDDSLTFKEDIQKAQVSGQGDSLHEHIANLAGSPAIKKGILQTVKVV
DELVKVMGGHKPENIVIEMARENQTTQKGQKNSRERMKRIEEGIKELGSQILKEHPV
ENTQLQNEKLYLYYLQNGRDMYVDQELDINRLSDYDVDHIVPQSFLKDDSIDNKVL
TRSDKNRGKSDNVPSEEVVKKMKNYWRQLLNAKLITQRKFDNLTKAERGGLSELD
KAGFIKRQLVETRQITKHVAQILDSRMNTKYDENDKLIREVKVITLKSKLVSDFRKDF
QFYKVREINNYHHAHDAYLNAVVGTALIKKYPKLESEFVYGDYKVYDVRKMIAKSE
QEIGKATAKYFFYSNIMNFFKTEITLANGEIRKRPLIETNGETGEIVWDKGRDFATVR
KVLSMPQVNIVKKTEVQTGGFSKESILPKGNSDKLIARKKDWDPKKYGGFNSPTVA
YSVLVVAKVEKGKSKKLKSVKELLGITIMERSSFEKNPIDFLEAKGYKEVKKDLIIKL
PKYSLFELENGRKRMLASAGVLQKGNELALPSKYVNFLYLASHYEKLKGSPEDNEQ
KQLFVEQHKHYLDEIIEQISEFSKRVILADANLDKVLSAYNKHRDKPIREQAENIIHLF
TLTNLGAPAAFKYFDTTINRKQYNTTKEVLDATLIRQSITGLYETRIDLSQLGGD

[0267] In some embodiments, the disclosed base editors comprise a napDNAbp domain that has a sequence that is at least 90%, at least 95%, at least 98%, or at least 99% identical to SpCas9-NRTH. In some embodiments, the disclosed base editors comprise a napDNAbp domain that comprises SpCas9-NRTH. The SpCas9-NRTH has an amino acid sequence as presented in SEQ ID NO: 437 (underligned residues are mutated relative to SpCas9):

(SEQ ID NO: 437)
MDKKYSIGLDIGTNSVGWAVITDEYKVPSKKFKVLGNTDRHSIKKNLIGAL
LFDSGETAEATRLKRTARRRYTRRKNRICYLQEIFSNEMAKVDDSFFHRLEESFLVEE
DKKHERHPIFGNIVDEVAYHEKYPTIYHLRKKLVDSTDKADLRLIYLALAHMIKFRG
HFLIEGDLNPDNSDVDKLFIQLVQTYNQLFEENPINASGVDAKAILSARLSKSRRLEN
LIAQLPGEKKNGLFGNLIALSLGLTPNFKSNFDLAEDAKLQLSKDTYDDDLDNLLAQI
GDQYADLFLAAKNLSDAILLSDILRVNTEITKAPLSASMVKRYDEHHQDLTLLKALV
RQQLPEKYKEIFFDQSKNGYAGYIDGGASQEEFYKFIKPILEKMDGTEELLVKLNRED
LLRKQRTFDNGIIPHQIHLGELHAILRRQGDFYPFLKDNREKIEKILTFRIPYYVGPLAR
GNSRFAWMTRKSEETITPWNFEEVVDKGASAQSFIERMTNFDKNLPNEKVLPKHSLL
YEYFTVYNELTKVKYVTEGMRKPAFLSGEQKKAIVDLLFKTNRKVTVKQLKEDYFK
KIECFDSVEISGVEDRFNASLGTYHDLLKIIKDKDFLDNEENEDILEDIVLTLTLFEDRE
MIEERLKTYAHLFDDKVMKQLKRLRYTGWGRLSRKLINGIRDKQSGKTILDFLKSDG
FANRNFMQLIHDDSLTFKEDIQKAQVSGQGDSLHEHIANLAGSPAIKKGILQTVKVV
DELVKVMGGHKPENIVIEMARENQTTQKGQKNSRERMKRIEEGIKELGSQILKEHPV
ENTQLQNEKLYLYYLQNGRDMYVDQELDINRLSDYDVDHIVPQSFLKDDSIDNKVL
TRSDKNRGKSDNVPSEEVVKKMKNYWRQLLNAKLITQRKFDNLTKAERGGLSELD
KAGFIKRQLVETRQITKHVAQILDSRMNTKYDENDKLIREVKVITLKSKLVSDFRKDF
QFYKVREINNYHHAHDAYLNAVVGTALIKKYPKLESEFVYGDYKVYDVRKMIAKSE
QEIGKATAKYFFYSNIMNFFKTEITLANGEIRKRPLIETNGETGEIVWDKGRDFATVR
KVLSMPQVNIVKKTEVQTGGFSKESILPKGNSDKLIARKKDWDPKKYGGFNSPTVA
YSVLVVAKVEKGKSKKLKSVKELLGITIMERSSFEKNPIGFLEAKGYKEVKKDLIIKL
PKYSLFELENGRKRMLASASVLHKGNELALPSKYVNFLYLASHYEKLKGSSEDNKQ
KQLFVEQHKHYLDEIIEQISEFSKRVILADANLDKVLSAYNKHRDKPIREQAENIIHLF
TLTNLGASAAFKYFDTTIGRKLYTSTKEVLDATLIHQSITGLYETRIDLSQLGGD

[0268] In other embodiments, the napDNAbp of any of the disclosed base editors comprises a Cas9 derived from a Streptococcus macacae, e.g., Streptococcus macacae NCTC 11558, or SmacCas9, or a variant thereof. In some embodiments, the napDNAbp comprises a hybrid variant of SmacCas9 that incorporates an SpCas9 domain with the SmacCas9 domain and is known as Spy-macCas9, or a variant thereof. In some embodiments, the napDNAbp comprises a hybrid variant of SmacCas9 that incorporates an increased nucleolytic variant of an SpCas9 (iSpy Cas9) domain and is known as iSpy-macCas9. Relative to Spymac-Cas9, iSpyMac-Cas9 contains two mutations, R221K and N394K, that were identified by deep mutational scans of Spy Cas9 that raise modification rates of the protein on most targets. See Jakimo et al., bioRxiv, A Cas9 with Complete PAM Recognition for Adenine Dinucleotides (September 2018), herein incorporated by reference. Jakimo et al. showed that the hybrids Spy-macCas9 and iSpy-macCas9 recognize a short 5′-NAA-3′ PAM and recognized all evaluated adenine dinucleotide PAM sequences and posseseds robust editing efficiency in human cells. Liu et al. engineered base editors containing Spy-mac Cas9, and demonstrated that cytidine and adenine base editors containing Spymac domains can induce efficient C-to-T and A-to-G conversions in vivo. In addition, Liu et al. suggested that the PAM scope of Spy-mac Cas9 may be 5′-TAAA-3′, rather than 5′-NAA-3′ as reported by Jakimo et al. See Liu et al. Cell Discovery (2019) 5:58, herein incorporated by reference.

[0269] In some embodiments, the disclosed base editors comprise a napDNAbp domain that has a sequence that is at least 90%, at least 95%, at least 98%, or at least 99% identical to iSpyMac-Cas9. In some embodiments, the disclosed base editors comprise a napDNAbp domain that comprises iSpyMac-Cas9. The iSpyMac-Cas9 has an amino acid sequence as presented in SEQ ID NO: 439 (R221K and N394K mutations are underlined):

(SEQ ID NO: 439)
DKKYSIGLDIGTNSVGWAVITDEYKVPSKKFKVLGNTDRHSIKKNLIGALL
FDSGETAEATRLKRTARRRYTRRKNRICYLQEIFSNEMAKVDDSFFHRLEESFLVEED
KKHERHPIFGNIVDEVAYHEKYPTIYHLRKKLVDSTDKADLRLIYLALAHMIKFRGH
FLIEGDLNPDNSDVDKLFIQLVQTYNQLFEENPINASGVDAKAILSARLSKSRKLENLI
AQLPGEKKNGLFGNLIALSLGLTPNFKSNFDLAEDAKLQLSKDTYDDDLDNLLAQIG
DQYADLFLAAKNLSDAILLSDILRVNTEITKAPLSASMIKRYDEHHQDLTLLKALVRQ
QLPEKYKEIFFDQSKNGYAGYIDGGASQEEFYKFIKPILEKMDGTEELLVKLKREDLL
RKQRTFDNGSIPHQIHLGELHAILRRQEDFYPFLKDNREKIEKILTFRIPYYVGPLARG
NSRFAWMTRKSEETITPWNFEEVVDKGASAQSFIERMTNFDKNLPNEKVLPKHSLLY
EYFTVYNELTKVKYVTEGMRKPAFLSGEQKKAIVDLLFKTNRKVTVKQLKEDYFKK
IECFDSVEISGVEDRFNASLGTYHDLLKIIKDKDFLDNEENEDILEDIVLTLTLFEDREM
IEERLKTYAHLFDDKVMKQLKRRRYTGWGRLSRKLINGIRDKQSGKTILDFLKSDGF
ANRNFMQLIHDDSLTFKEDIQKAQVSGQGDSLHEHIANLAGSPAIKKGILQTVKVVD
ELVKVMGRHKPENIVIEMARENQTTQKGQKNSRERMKRIEEGIKELGSQILKEHPVE
NTQLQNEKLYLYYLQNGRDMYVDQELDINRLSDYDVDHIVPQSFLKDDSIDNKVLT
RSDKNRGKSDNVPSEEVVKKMKNYWRQLLNAKLITQRKFDNLTKAERGGLSELDK
AGFIKRQLVETRQITKHVAQILDSRMNTKYDENDKLIREVKVITLKSKLVSDFRKDFQ
FYKVREINNYHHAHDAYLNAVVGTALIKKYPKLESEFVYGDYKVYDVRKMIAKSEQ
EIGKATAKYFFYSNIMNFFKTEITLANGEIRKRPLIETNGETGEIVWDKGRDFATVRK
VLSMPQVNIVKKTEIQTVGQNGGLFDDNPKSPLEVTPSKLVPLKKELNPKKYGGYQK
PTTAYPVLLITDTKQLIPISVMNKKQFEQNPVKFLRDRGYQQVGKNDFIKLPKYTLVD
IGDGIKRLWASSKEIHKGNQLVVSKKSQILLYHAHHLDSDLSNDYLQNHNQQFDVLF
NEIISFSKKCKLGKEHIQKIENVYSNKKNSASIEELAESFIKLLGFTQLGATSPFNFLGV
KLNQKQYKGKKDYILPCTEGTLIRQSITGLYETRVDLSKIGE

[0270] In other embodiments, the napDNAbp of any of the disclosed base editors is a prokaryotic homolog of an Argonaute protein. Prokaryotic homologs of Argonaute proteins are known and have been described, for example, in Makarova K., et al., “Prokaryotic homologs of Argonaute proteins are predicted to function as key components of a novel system of defense against mobile genetic elements”, Biol Direct. 2009 Aug. 25; 4:29. doi: 10.1186/1745-6150-4-29, the entire contents of which is hereby incorporated by reference. In some embodiments, the napDNAbp is a Marinitoga piezophila Argunaute (MpAgo) protein. The CRISPR-associated Marinitoga piezophila Argunaute (MpAgo) protein cleaves single-stranded target sequences using 5′-phosphorylated guides. The 5′ guides are used by all known Argonautes. The crystal structure of an MpAgo-RNA complex shows a guide strand binding site comprising residues that block 5′ phosphate interactions. This data suggests the evolution of an Argonaute subclass with noncanonical specificity for a 5′-hydroxylated guide. See, e.g., Kaya et al., “A bacterial Argonaute with noncanonical guide RNA specificity”, Proc Natl Acad Sci USA. 2016 Apr. 12; 113(15):4057-62, the entire contents of which are hereby incorporated by reference). It should be appreciated that other argonaute proteins may be used, and are within the scope of this disclosure.

[0271] In some embodiments, the napDNAbp is a single effector of a microbial CRISPR-Cas system. Single effectors of microbial CRISPR-Cas systems include, without limitation, Cas9, Cpf1, C2c1, C2c2, and C2c3. Typically, microbial CRISPR-Cas systems are divided into Class 1 and Class 2 systems. Class 1 systems have multisubunit effector complexes, while Class 2 systems have a single protein effector. For example, Cas9 and Cpf1 are Class 2 effectors. In addition to Cas9 and Cpf1, three distinct Class 2 CRISPR-Cas systems (C2c1, C2c2, and C2c3) have been described by Shmakov et al., “Discovery and Functional Characterization of Diverse Class 2 CRISPR Cas Systems”, Mol. Cell, 2015 Nov. 5; 60(3): 385-397, the entire contents of which is hereby incorporated by reference. Effectors of two of the systems, C2c1 and C2c3, contain RuvC-like endonuclease domains related to Cpf1. A third system, C2c2 contains an effector with two predicated HEPN RNase domains. Production of mature CRISPR RNA is tracrRNA-independent, unlike production of CRISPR RNA by C2c1. C2c1 depends on both CRISPR RNA and tracrRNA for DNA cleavage. Bacterial C2c2 has been shown to possess a unique RNase activity for CRISPR RNA maturation distinct from its RNA-activated single-stranded RNA degradation activity. These RNase functions are different from each other and from the CRISPR RNA-processing behavior of Cpf1. See, e.g., East-Seletsky, et al., “Two distinct RNase activities of CRISPR-C2c2 enable guide-RNA processing and RNA detection”, Nature, 2016 Oct. 13; 538(7624):270-273, the entire contents of which are hereby incorporated by reference. In vitro biochemical analysis of C2c2 in Leptotrichia shahii has shown that C2c2 is guided by a single CRISPR RNA and can be programed to cleave ssRNA targets carrying complementary protospacers. Catalytic residues in the two conserved HEPN domains mediate cleavage. Mutations in the catalytic residues generate catalytically inactive RNA-binding proteins. See e.g., Abudayyeh et al., “C2c2 is a single-component programmable RNA-guided RNA-targeting CRISPR effector”, Science, 2016 Aug. 5; 353(6299), the entire contents of which are hereby incorporated by reference.

[0272] Some aspects of this disclosure provide Cas9 proteins that exhibit activity on a target sequence that does not comprise the canonical PAM (5′-NGG-3′, where N is A, C, G, or T) at its 3′-end. In some embodiments, the Cas9 protein exhibits activity on a target sequence comprising a 5′-NGG-3′ PAM sequence at its 3′-end. In some embodiments, the Cas9 protein exhibits activity on a target sequence comprising a 5′-NNG-3′ PAM sequence at its 3′-end. In some embodiments, the Cas9 protein exhibits activity on a target sequence comprising a 5′-NNA-3′ PAM sequence at its 3′-end. In some embodiments, the Cas9 protein exhibits activity on a target sequence comprising a 5′-NNC-3′ PAM sequence at its 3′-end. In some embodiments, the Cas9 protein exhibits activity on a target sequence comprising a 5′-NNT-3′ PAM sequence at its 3′-end. In some embodiments, the Cas9 protein exhibits activity on a target sequence comprising a 5′-NGT-3′ PAM sequence at its 3′-end. In some embodiments, the Cas9 protein exhibits activity on a target sequence comprising a 5′-NGA-3′ PAM sequence at its 3′-end. In some embodiments, the Cas9 protein exhibits activity on a target sequence comprising a 5′-NGC-3′ PAM sequence at its 3′-end. In some embodiments, the Cas9 protein exhibits activity on a target sequence comprising a 5′-NAA-3′ PAM sequence at its 3′-end. In some embodiments, the Cas9 protein exhibits activity on a target sequence comprising a 5′-NAC-3′ PAM sequence at its 3′-end. In some embodiments, the Cas9 protein exhibits activity on a target sequence comprising a 5′-NAT-3′ PAM sequence at its 3′-end. In still other embodiments, the Cas9 protein exhibits activity on a target sequence comprising a 5′-NAG-3′ PAM sequence at its 3′-end.

[0273] It will also be appreciated that Cas9 enzymes from different bacterial species (i.e., Cas9 orthologs) can have varying PAM specificities. For example, Cas9 from Staphylococcus aureus (SaCas9) recognizes NGRRT (SEQ ID NO: 201) or NGRRN (SEQ ID NO: 202). In addition, Cas9 from Neisseria meningitis (NmeCas and Nme2Cas9) recognizes NNNNGATT (SEQ ID NO: 203). A Cas9 from Staphylococcus auricularis (SauriCas9) recognizes NNGG (SEQ ID NO: 204) and NNNGG (SEQ ID NO: 205). A Cas9 from Streptococcus thermophilis (StCas9) recognizes NNAGAAW (SEQ ID NO: 206). A Cas9 from Treponema denticola (TdCas) recognizes NAAAAC (SEQ ID NO: 207). The compact Cas9 ortholog from derived from Campylobacter jejuni (CjCas9) recognizes recognizes NNNNACA (SEQ ID NO: 208) and NNNNACAC (SEQ ID NO: 209) PAMs. These are example are not meant to be limiting. It will be further appreciated that non-SpCas9s bind a variety of PAM sequences, which makes them useful when no suitable SpCas9 PAM sequence is present at the desired target cut site. Furthermore, non-SpCas9s may have other characteristics that make them more useful than SpCas9. For example, Cas9 from Staphylococcus aureus (SaCas9) is about 1 kilobase smaller than SpCas9, so it can be packaged into adeno-associated virus (AAV). Further reference may be made to Shah et al., “Protospacer recognition motifs: mixed identities and functional diversity,” RNA Biology, 10(5): 891-899 (which is incorporated herein by reference).

[0274] In some embodiments, the disclosed base editors comprise a napDNAbp domain comprising a SpCas9-NG, which has a PAM that corresponds to NGN. In some embodiments, the disclosed base editors comprise a napDNAbp domain that has a sequence that is at least 90%, at least 95%, at least 98%, or at least 99% identical to SpCas9-NG. The sequence of SpCas9-NG is illustrated below:

(SEQ ID NO: 210)
MDKKYSIGLAIGTNSVGWAVITDEYKVPSKKFKVLGNTDRHSIKKNLIGALLFDSGE
TAEATRLKRTARRRYTRRKNRICYLQEIFSNEMAKVDDSFFHRLEESFLVEEDKKHE
RHPIFGNIVDEVAYHEKYPTIYHLRKKLVDSTDKADLRLIYLALAHMIKFRGHFLIEG
DLNPDNSDVDKLFIQLVQTYNQLFEENPINASGVDAKAILSARLSKSRRLENLIAQLP
GEKKNGLFGNLIALSLGLTPNFKSNFDLAEDAKLQLSKDTYDDDLDNLLAQIGDQYA
DLFLAAKNLSDAILLSDILRVNTEITKAPLSASMIKRYDEHHQDLTLLKALVRQQLPE
KYKEIFFDQSKNGYAGYIDGGASQEEFYKFIKPILEKMDGTEELLVKLNREDLLRKQR
TFDNGSIPHQIHLGELHAILRRQEDFYPFLKDNREKIEKILTFRIPYYVGPLARGNSRFA
WMTRKSEETITPWNFEEVVDKGASAQSFIERMTNFDKNLPNEKVLPKHSLLYEYFTV
YNELTKVKYVTEGMRKPAFLSGEQKKAIVDLLFKTNRKVTVKQLKEDYFKKIECFD
SVEISGVEDRFNASLGTYHDLLKIIKDKDFLDNEENEDILEDIVLTLTLFEDREMIEERL
KTYAHLFDDKVMKQLKRRRYTGWGRLSRKLINGIRDKQSGKTILDFLKSDGFANRN
FMQLIHDDSLTFKEDIQKAQVSGQGDSLHEHIANLAGSPAIKKGILQTVKVVDELVK
VMGRHKPENIVIEMARENQTTQKGQKNSRERMKRIEEGIKELGSQILKEHPVENTQL
QNEKLYLYYLQNGRDMYVDQELDINRLSDYDVDHIVPQSFLKDDSIDNKVLTRSDK
NRGKSDNVPSEEVVKKMKNYWRQLLNAKLITQRKFDNLTKAERGGLSELDKAGFIK
RQLVETRQITKHVAQILDSRMNTKYDENDKLIREVKVITLKSKLVSDFRKDFQFYKV
REINNYHHAHDAYLNAVVGTALIKKYPKLESEFVYGDYKVYDVRKMIAKSEQEIGK
ATAKYFFYSNIMNFFKTEITLANGEIRKRPLIETNGETGEIVWDKGRDFATVRKVLSM
PQVNIVKKTEVQTGGFSKESIRPKRNSDKLIARKKDWDPKKYGGFVSPTVAYSVLVV
AKVEKGKSKKLKSVKELLGITIMERSSFEKNPIDFLEAKGYKEVKKDLIIKLPKYSLFE
LENGRKRMLASARFLQKGNELALPSKYVNFLYLASHYEKLKGSPEDNEQKQLFVEQ
HKHYLDEIIEQISEFSKRVILADANLDKVLSAYNKHRDKPIREQAENIIHLFTLTNLGA
PRAFKYFDTTIDRKVYRSTKEVLDATLIHQSITGLYETRIDLSQLGGD

[0275] In some embodiments, the disclosed base editors comprise a napDNAbp domain comprising a SpCas9n-NG (or nCas9-NG), which has a PAM that corresponds to NGN. In some embodiments, the disclosed base editors comprise a napDNAbp domain that has a sequence that is at least 90%, at least 95%, at least 98%, or at least 99% identical to an nCas9-NG. In some embodiments, the disclosed base editors comprise a napDNAbp domain comprising a high fidelity SpCas9n-NG (or HF-nCas9-NG), which has a PAM that corresponds to NGN. In some embodiments, the disclosed base editors comprise a napDNAbp domain that has a sequence that is at least 90%, at least 95%, at least 98%, or at least 99% identical to an HF-nCas9-NG.

[0276] In some embodiments, the disclosed base editors comprise a napDNAbp domain comprising a S. aureus Cas9 nickase KKH, or SaCas9-KKH, which has a PAM that corresponds to NNNRRT (SEQ ID NO: 211). This Cas9 variant contains the amino acid substitutions D10A, E782K, N968K, and R1015H relative to wild-type SaCas9, set forth as SEQ ID NO: 377. In some embodiments, the disclosed base editors comprise a napDNAbp domain that has a sequence that is at least 90%, at least 95%, at least 98%, or at least 99% identical to SaCas9-KKH. The sequence of SaCas9-KKH is illustrated below:

(SEQ ID NO: 212)
MGKRNYILGLAIGITSVGYGIIDYETRDVIDAGVRLFKEANVENNEGRRSKRGARRL
KRRRRHRIQRVKKLLFDYNLLTDHSELSGINPYEARVKGLSQKLSEEEFSAALLHLAK
RRGVHNVNEVEEDTGNELSTKEQISRNSKALEEKYVAELQLERLKKDGEVRGSINRF
KTSDYVKEAKQLLKVQKAYHQLDQSFIDTYIDLLETRRTYYEGPGEGSPFGWKDIKE
WYEMLMGHCTYFPEELRSVKYAYNADLYNALNDLNNLVITRDENEKLEYYEKFQII
ENVFKQKKKPTLKQIAKEILVNEEDIKGYRVTSTGKPEFTNLKVYHDIKDITARKEIIE
NAELLDQIAKILTIYQSSEDIQEELTNLNSELTQEEIEQISNLKGYTGTHNLSLKAINLIL
DELWHTNDNQIAIFNRLKLVPKKVDLSQQKEIPTTLVDDFILSPVVKRSFIQSIKVINAI
IKKYGLPNDIIIELAREKNSKDAQKMINEMQKRNRQTNERIEEIIRTTGKENAKYLIEKI
KLHDMQEGKCLYSLEAIPLEDLLNNPFNYEVDHIIPRSVSFDNSFNNKVLVKQEENSK
KGNRTPFQYLSSSDSKISYETFKKHILNLAKGKGRISKTKKEYLLEERDINRFSVQKDF
INRNLVDTRYATRGLMNLLRSYFRVNNLDVKVKSINGGFTSFLRRKWKFKKERNKG
YKHHAEDALIIANADFIFKEWKKLDKAKKVMENQMFEEKQAESMPEIETEQEYKEIF
ITPHQIKHIKDFKDYKYSHRVDKKPNRKLINDTLYSTRKDDKGNTLIVNNLNGLYDK
DNDKLKKLINKSPEKLLMYHHDPQTYQKLKLIMEQYGDEKNPLYKYYEETGNYLTK
YSKKDNGPVIKKIKYYGNKLNAHLDITDDYPNSRNKVVKLSLKPYRFDVYLDNGVY
KFVTVKNLDVIKKENYYEVNSKCYEEAKKLKKISNQAEFIASFYKNDLIKINGELYRV
IGVNNDLLNRIEVNMIDITYREYLENMNDKRPPHIIKTIASKTQSIKKYSTDILGNLYE
VKSKKHPQIIKKG

[0277] In some embodiments, the disclosed base editors comprise a napDNAbp domain comprising a a S. pyogenes Cas9 nickase KKH, or SpCas9-KKH, which has a PAM that corresponds to NNNRRT (SEQ ID NO: 213).

[0278] In some embodiments, the disclosed base editors comprise a napDNAbp domain comprising a xCas9, an evolved variant of SpCas9. In some embodiments, the disclosed base editors comprise a napDNAbp domain that has a sequence that is at least 90%, at least 95%, at least 98%, or at least 99% identical to xCas9. The sequence of xCas9 is illustrated below:

(SEQ ID NO: 214)
MDKKYSIGLAIGTNSVGWAVITDEYKVPSKKFKVLGNTDRHSIKKNLIGALLFDSGE
TAEATRLKRTARRRYTRRKNRICYLQEIFSNEMAKVDDSFFHRLEESFLVEEDKKHE
RHPIFGNIVDEVAYHEKYPTIYHLRKKLVDSTDKADLRLIYLALAHMIKFRGHFLIEG
DLNPDNSDVDKLFIQLVQTYNQLFEENPINASGVDAKAILSARLSKSRRLENLIAQLP
GEKKNGLFGNLIALSLGLTPNFKSNFDLAEDTKLQLSKDTYDDDLDNLLAQIGDQYA
DLFLAAKNLSDAILLSDILRVNTEITKAPLSASMIKLYDEHHQDLTLLKALVRQQLPE
KYKEIFFDQSKNGYAGYIDGGASQEEFYKFIKPILEKMDGTEELLVKLNREDLLRKQR
TFDNGIIPHQIHLGELHAILRRQEDFYPFLKDNREKIEKILTFRIPYYVGPLARGNSRFA
WMTRKSEETITPWNFEKVVDKGASAQSFIERMTNFDKNLPNEKVLPKHSLLYEYFTV
YNELTKVKYVTEGMRKPAFLSGDQKKAIVDLLFKTNRKVTVKQLKEDYFKKIECFD
SVEISGVEDRFNASLGTYHDLLKIIKDKDFLDNEENEDILEDIVLTLTLFEDREMIEERL
KTYAHLFDDKVMKQLKRRRYTGWGRLSRKLINGIRDKQSGKTILDFLKSDGFANRN
FIQLIHDDSLTFKEDIQKAQVSGQGDSLHEHIANLAGSPAIKKGILQTVKVVDELVKV
MGRHKPENIVIEMARENQTTQKGQKNSRERMKRIEEGIKELGSQILKEHPVENTQLQ
NEKLYLYYLQNGRDMYVDQELDINRLSDYDVDHIVPQSFLKDDSIDNKVLTRSDKN
RGKSDNVPSEEVVKKMKNYWRQLLNAKLITQRKFDNLTKAERGGLSELDKAGFIKR
QLVETRQITKHVAQILDSRMNTKYDENDKLIREVKVITLKSKLVSDFRKDFQFYKVR
EINNYHHAHDAYLNAVVGTALIKKYPKLESEFVYGDYKVYDVRKMIAKSEQEIGKA
TAKYFFYSNIMNFFKTEITLANGEIRKRPLIETNGETGEIVWDKGRDFATVRKVLSMP
QVNIVKKTEVQTGGFSKESILPKRNSDKLIARKKDWDPKKYGGFDSPTVAYSVLVVA
KVEKGKSKKLKSVKELLGITIMERSSFEKNPIDFLEAKGYKEVKKDLIIKLPKYSLFEL
ENGRKRMLASAGVLQKGNELALPSKYVNFLYLASHYEKLKGSPEDNEQKQLFVEQH
KHYLDEIIEQISEFSKRVILADANLDKVLSAYNKHRDKPIREQAENIIHLFTLTNLGAP
AAFKYFDTTIDRKRYTSTKEVLDATLIHQSITGLYETRIDLSQLGGD

### Cas9 Circular Permutants

[0279] In various embodiments, the base editors disclosed herein may comprise a circular permutant of Cas9.

[0280] The term “circularly permuted Cas9” or “circular permutant” of Cas9 or “CP-Cas9”) refers to any Cas9 protein, or variant thereof, that occurs or has been modify to engineered as a circular permutant variant, which means the N-terminus and the C-terminus of a Cas9 protein (e.g., a wild type Cas9 protein) have been topically rearranged. Such circularly permuted Cas9 proteins, or variants thereof, retain the ability to bind DNA when complexed with a guide RNA (gRNA). See, Oakes et al., “Protein Engineering of Cas9 for enhanced function,” Methods Enzymol, 2014, 546: 491-511 and Oakes et al., “CRISPR-Cas9 Circular Permutants as Programmable Scaffolds for Genome Modification,” Cell, Jan. 10, 2019, 176: 254-267, and Huang, T. P. et al. Circularly permuted and PAM-modified Cas9 variants broaden the targeting scope of base editors. Nat. Biotechnol. 37, 626-631 (2019). each of are incorporated herein by reference. Reference is also made to International Publication No. WO 2020/041751, published Feb. 27, 2020, herein incorporated by reference. The present disclosure contemplates any previously known CP-Cas9 or use a new CP-Cas9 so long as the resulting circularly permuted protein retains the ability to bind DNA when complexed with a guide RNA (gRNA).

[0281] Any of the Cas9 proteins described herein, including any variant, ortholog, or naturally occurring Cas9 or equivalent thereof, may be reconfigured as a circular permutant variant.

[0282] In various embodiments, the circular permutants of Cas9 may have the following structure:
[0283] N-terminus-[original C-terminus]-[optional linker]-[original N-terminus]-C-terminus.

[0284] As an example, the present disclosure contemplates the following circular permutants of canonical S. pyogenes Cas9 (1368 amino acids of UniProtKB-Q99ZW2 (CAS9_STRP1) (numbering is based on the amino acid position in SEQ ID NO: 326)):
[0285] N-terminus-[1268-1368]-[optional linker]-[1-1267]-C-terminus;
[0286] N-terminus-[1168-1368]-[optional linker]-[1-1167]-C-terminus;
[0287] N-terminus-[1068-1368]-[optional linker]-[1-1067]-C-terminus;
[0288] N-terminus-[968-1368]-[optional linker]-[1-967]-C-terminus;
[0289] N-terminus-[868-1368]-[optional linker]-[1-867]-C-terminus;
[0290] N-terminus-[768-1368]-[optional linker]-[1-767]-C-terminus;
[0291] N-terminus-[668-1368]-[optional linker]-[1-667]-C-terminus;
[0292] N-terminus-[568-1368]-[optional linker]-[1-567]-C-terminus;
[0293] N-terminus-[468-1368]-[optional linker]-[1-467]-C-terminus;
[0294] N-terminus-[368-1368]-[optional linker]-[1-367]-C-terminus;
[0295] N-terminus-[268-1368]-[optional linker]-[1-267]-C-terminus;
[0296] N-terminus-[168-1368]-[optional linker]-[1-167]-C-terminus;
[0297] N-terminus-[68-1368]-[optional linker]-[1-67]-C-terminus; or
[0298] N-terminus-[10-1368]-[optional linker]-[1-9]-C-terminus, or the corresponding circularpermutants of other Cas9 proteins (including other Cas9 orthologs, variants, etc).

[0299] In particular embodiments, the circular permuant Cas9 has the following structure (based on S. pyogenes Cas9 (1368 amino acids of UniProtKB-Q99ZW2 (CAS9_STRP1) (numbering is based on the amino acid position in SEQ ID NO: 326):
[0300] N-terminus-[102-1368]-[optional linker]-[1-101]-C-terminus;
[0301] N-terminus-[1028-1368]-[optional linker]-[1-1027]-C-terminus;
[0302] N-terminus-[1041-1368]-[optional linker]-[1-1043]-C-terminus;
[0303] N-terminus-[1249-1368]-[optional linker]-[1-1248]-C-terminus; or
[0304] N-terminus-[1300-1368]-[optional linker]-[1-1299]-C-terminus, or the corresponding circular permutants of other Cas9 proteins (including other Cas9 orthologs, variants, etc).

[0305] In still other embodiments, the circular permuant Cas9 has the following structure (based on S. pyogenes Cas9 (1368 amino acids of UniProtKB-Q99ZW2 (CAS9_STRP1) (numbering is based on the amino acid position in SEQ ID NO: 326):
[0306] N-terminus-[103-1368]-[optional linker]-[1-102]-C-terminus;
[0307] N-terminus-[1029-1368]-[optional linker]-[1-1028]-C-terminus;
[0308] N-terminus-[1042-1368]-[optional linker]-[1-1041]-C-terminus;
[0309] N-terminus-[1250-1368]-[optional linker]-[1-1249]-C-terminus; or
[0310] N-terminus-[1301-1368]-[optional linker]-[1-1300]-C-terminus, or the corresponding circular permutants of other Cas9 proteins (including other Cas9 orthologs, variants, etc.).

[0311] In some embodiments, the circular permutant can be formed by linking a C-terminal fragment of a Cas9 to an N-terminal fragment of a Cas9, either directly or by using a linker, such as an amino acid linker. In some embodiments, The C-terminal fragment may correspond to the C-terminal 95% or more of the amino acids of a Cas9 (e.g., amino acids about 1300-1368), or the C-terminal 90%, 85%, 80%, 75%, 70%, 65%, 60%, 55%, 50%, 45%, 40%, 35%, 30%, 25%, 20%, 15%, 10%, or 5% or more of a Cas9 (e.g., any one of SEQ ID NOs: 18-25). The N-terminal portion may correspond to the N-terminal 95% or more of the amino acids of a Cas9 (e.g., amino acids about 1-1300), or the N-terminal 90%, 85%, 80%, 75%, 70%, 65%, 60%, 55%, 50%, 45%, 40%, 35%, 30%, 25%, 20%, 15%, 10%, or 5% or more of a Cas9 (e.g., of SEQ ID NO: 326).

[0312] In some embodiments, the circular permutant can be formed by linking a C-terminal fragment of a Cas9 to an N-terminal fragment of a Cas9, either directly or by using a linker, such as an amino acid linker. In some embodiments, the C-terminal fragment that is rearranged to the N-terminus, includes or corresponds to the C-terminal 30% or less of the amino acids of a Cas9 (e.g., amino acids 1012-1368 of SEQ ID NO: 326). In some embodiments, the C-terminal fragment that is rearranged to the N-terminus, includes or corresponds to the C-terminal 30%, 29%, 28%, 27%, 26%, 25%, 24%, 23%, 22%, 21%, 20%, 19%, 18%, 17%, 16%, 15%, 14%, 13%, 12%, 11%, 10%, 9%, 8%, 7%, 6%, 5%, 4%, 3%, 2%, or 1% of the amino acids of a Cas9 (e.g., the Cas9 of SEQ ID NO: 326). In some embodiments, the C-terminal fragment that is rearranged to the N-terminus, includes or corresponds to the C-terminal 410 residues or less of a Cas9 (e.g., the Cas9 of SEQ ID NO: 326). In some embodiments, the C-terminal portion that is rearranged to the N-terminus, includes or corresponds to the C-terminal 410, 400, 390, 380, 370, 360, 350, 340, 330, 320, 310, 300, 290, 280, 270, 260, 250, 240, 230, 220, 210, 200, 190, 180, 170, 160, 150, 140, 130, 120, 110, 100, 90, 80, 70, 60, 50, 40, 30, 20, or 10 residues of a Cas9 (e.g., the Cas9 of SEQ ID NO: 326). In some embodiments, the C-terminal portion that is rearranged to the N-terminus, includes or corresponds to the C-terminal 357, 341, 328, 120, or 69 residues of a Cas9 (e.g., the Cas9 of SEQ ID NO: 326).

[0313] In other embodiments, circular permutant Cas9 variants may be defined as a topological rearrangement of a Cas9 primary structure based on the following method, which is based on S. pyogenes Cas9 of SEQ ID NO: 326: (a) selecting a circular permutant (CP) site corresponding to an internal amino acid residue of the Cas9 primary structure, which dissects the original protein into two halves: an N-terminal region and a C-terminal region; (b) modifying the Cas9 protein sequence (e.g., by genetic engineering techniques) by moving the original C-terminal region (comprising the CP site amino acid) to preceed the original N-terminal region, thereby forming a new N-terminus of the Cas9 protein that now begins with the CP site amino acid residue. The CP site can be located in any domain of the Cas9 protein, including, for example, the helical-II domain, the RuvCIII domain, or the CTD domain. For example, the CP site may be located (relative the S. pyogenes Cas9 of SEQ ID NO: 326) at original amino acid residue 181, 199, 230, 270, 310, 1010, 1016, 1023, 1029, 1041, 1247, 1249, or 1282. Thus, once relocated to the N-terminus, original amino acid 181, 199, 230, 270, 310, 1010, 1016, 1023, 1029, 1041, 1247, 1249, or 1282 would become the new N-terminal amino acid. Nomenclature of these CP-Cas9 proteins may be referred to as Cas9-CP¹⁸¹, Cas9-CP¹⁹⁹, Cas9-CP²³⁰, Cas9-CP²⁷⁰, Cas9-CP³¹⁰, Cas9-CP¹⁰¹⁰, Cas9-CP¹⁰¹⁶, Cas9-CP¹⁰²³, Cas9-CP¹⁰²⁹, Cas9-CP¹⁰⁴¹, Cas9-CP¹²⁴⁷, Cas9-CP¹²⁴⁹, and Cas9-CP¹²⁸², respectively. This description is not meant to be limited to making CP variants from SEQ ID NO: 326, but may be implemented to make CP variants in any Cas9 sequence, either at CP sites that correspond to these positions, or at other CP sites entirely. This description is not meant to limit the specific CP sites in any way. Virtually any CP site may be used to form a CP-Cas9 variant.

[0314] Exemplary CP-Cas9 amino acid sequences, based on the Cas9 of SEQ ID NO: 326, are provided below in which linker sequences are indicated by underlining and optional methionine (M) residues are indicated in bold. It should be appreciated that the disclosure provides CP-Cas9 sequences that do not include a linker sequence or that include different linker sequences. It should be appreciated that CP-Cas9 sequences may be based on Cas9 sequences other than that of SEQ ID NO: 326 and any examples provided herein are not meant to be limiting. Exemplary CP-Cas9 sequences are as follows:

| CP name | Sequence | SEQ ID NO: |
|---|---|---|
| CP1012 | DYKVYDVRKMIAKSEQEIGKATAKYFFYSNIMNFFKTEITLA | SEQ ID NO: |
| | NGEIRKRPLIETNGETGEIVWDKGRDFATVRKVLSMPQVNIV | 396 |
| | KKTEVQTGGFSKESILPKRNSDKLIARKKDWDPKKYGGFDS | |
| | PTVAYSVLVVAKVEKGKSKKLKSVKELLGITIMERSSFEKNPI | |
| | DFLEAKGYKEVKKDLIIKLPKYSLFELENGRKRMLASAGEL | |
| | QKGNELALPSKYVNFLYLASHYEKLKGSPEDNEQKQLFVEQ | |
| | HKHYLDEIIEQISEFSKRVILADANLDKVLSAYNKHRDKPIRE | |
| | QAENIIHLFTLTNLGAPAAFKYFDTTIDRKRYTSTKEVLDATL | |
| | IHQSITGLYETRIDLSQLGGDGGSGGSGGSGGSGGSGGSGGD | |
| | KKYSIGLAIGTNSVGWAVITDEYKVPSKKFKVLGNTDRHSIK | |
| | KNLIGALLFDSGETAEATRLKRTARRRYTRRKNRICYLQEIFS | |
| | NEMAKVDDSFFHRLEESFLVEEDKKHERHPIFGNIVDEVAYH | |
| | EKYPTIYHLRKKLVDSTDKADLRLIYLALAHMIKFRGHFLIE | |
| | GDLNPDNSDVDKLFIQLVQTYNQLFEENPINASGVDAKAILS | |
| | ARLSKSRRLENLIAQLPGEKKNGLFGNLIALSLGLTPNFKSNF | |
| | DLAEDAKLQLSKDTYDDDLDNLLAQIGDQYADLFLAAKNL | |
| | SDAILLSDILRVNTEITKAPLSASMIKRYDEHHQDLTLLKALV | |
| | RQQLPEKYKEIFFDQSKNGYAGYIDGGASQEEFYKFIKPILEK | |
| | MDGTEELLVKLNREDLLRKQRTFDNGSIPHQIHLGELHAILR | |
| | RQEDFYPFLKDNREKIEKILTFRIPYYVGPLARGNSRFAWMT | |
| | RKSEETITPWNFEEVVDKGASAQSFIERMTNFDKNLPNEKV | |
| | LPKHSLLYEYFTVYNELTKVKYVTEGMRKPAFLSGEQKKAI | |
| | VDLLFKTNRKVTVKQLKEDYFKKIECFDSVEISGVEDRFNAS | |
| | LGTYHDLLKIIKDKDFLDNEENEDILEDIVLTLTLFEDREMIE | |
| | ERLKTYAHLFDDKVMKQLKRRRYTGWGRLSRKLINGIRDK | |
| | QSGKTILDFLKSDGFANRNFMQLIHDDSLTFKEDIQKAQVSG | |
| | QGDSLHEHIANLAGSPAIKKGILQTVKVVDELVKVMGRHKP | |
| | ENIVIEMARENQTTQKGQKNSRERMKRIEEGIKELGSQILKE | |
| | HPVENTQLQNEKLYLYYLQNGRDMYVDQELDINRLSDYDV | |
| | DHIVPQSFLKDDSIDNKVLTRSDKNRGKSDNVPSEEVVKKM | |
| | KNYWRQLLNAKLITQRKFDNLTKAERGGLSELDKAGFIKRQ | |
| | LVETRQITKHVAQILDSRMNTKYDENDKLIREVKVITLKSKL | |
| | VSDFRKDFQFYKVREINNYHHAHDAYLNAVVGTALIKKYPK | |
| | LESEFVYG | |
| CP1028 | EIGKATAKYFFYSNIMNFFKTEITLANGEIRKRPLIETNGETG | SEQ ID NO: |
| | EIVWDKGRDFATVRKVLSMPQVNIVKKTEVQTGGFSKESILP | 397 |
| | KRNSDKLIARKKDWDPKKYGGFDSPTVAYSVLVVAKVEKG | |
| | KSKKLKSVKELLGITIMERSSFEKNPIDFLEAKGYKEVKKDLI | |
| | IKLPKYSLFELENGRKRMLASAGELQKGNELALPSKYVNFL | |
| | YLASHYEKLKGSPEDNEQKQLFVEQHKHYLDEIIEQISEFSK | |
| | RVILADANLDKVLSAYNKHRDKPIREQAENIIHLFTLTNLGA | |
| | PAAFKYFDTTIDRKRYTSTKEVLDATLIHQSITGLYETRIDLS | |
| | QLGGDGGSGGSGGSGGSGGSGGSGGMDKKYSIGLAIGTNS | |
| | VGWAVITDEYKVPSKKFKVLGNTDRHSIKKNLIGALLFDSGE | |
| | TAEATRLKRTARRRYTRRKNRICYLQEIFSNEMAKVDDSFFH | |
| | RLEESFLVEEDKKHERHPIFGNIVDEVAYHEKYPTIYHLRKKL | |
| | VDSTDKADLRLIYLALAHMIKFRGHFLIEGDLNPDNSDVDK | |
| | LFIQLVQTYNQLFEENPINASGVDAKAILSARLSKSRRLENLI | |
| | AQLPGEKKNGLFGNLIALSLGLTPNFKSNFDLAEDAKLQLSK | |
| | DTYDDDLDNLLAQIGDQYADLFLAAKNLSDAILLSDILRVNT | |
| | EITKAPLSASMIKRYDEHHQDLTLLKALVRQQLPEKYKEIFF | |
| | DQSKNGYAGYIDGGASQEEFYKFIKPILEKMDGTEELLVKLN | |
| | REDLLRKQRTFDNGSIPHQIHLGELHAILRRQEDFYPFLKDN | |
| | REKIEKILTFRIPYYVGPLARGNSRFAWMTRKSEETITPWNFE | |
| | EVVDKGASAQSFIERMTNFDKNLPNEKVLPKHSLLYEYFTV | |
| | YNELTKVKYVTEGMRKPAFLSGEQKKAIVDLLFKTNRKVTV | |
| | KQLKEDYFKKIECFDSVEISGVEDRFNASLGTYHDLLKIIKD | |
| | KDFLDNEENEDILEDIVLTLTLFEDREMIEERLKTYAHLFDDK | |
| | VMKQLKRRRYTGWGRLSRKLINGIRDKQSGKTILDFLKSDG | |
| | FANRNFMQLIHDDSLTFKEDIQKAQVSGQGDSLHEHIANLA | |
| | GSPAIKKGILQTVKVVDELVKVMGRHKPENIVIEMARENQT | |
| | TQKGQKNSRERMKRIEEGIKELGSQILKEHPVENTQLQNEKL | |
| | YLYYLQNGRDMYVDQELDINRLSDYDVDHIVPQSFLKDDSI | |
| | DNKVLTRSDKNRGKSDNVPSEEVVKKMKNYWRQLLNAKLI | |
| | TQRKFDNLTKAERGGLSELDKAGFIKRQLVETRQITKHVAQI | |
| | LDSRMNTKYDENDKLIREVKVITLKSKLVSDFRKDFQFYKV | |
| | REINNYHHAHDAYLNAVVGTALIKKYPKLESEFVYGDYKVY | |
| | DVRKMIAKSEQ | |
| CP1041 | NIMNFFKTEITLANGEIRKRPLIETNGETGEIVWDKGRDFATV | SEQ ID NO: |
| | RKVLSMPQVNIVKKTEVQTGGFSKESILPKRNSDKLIARKKD | 398 |
| | WDPKKYGGFDSPTVAYSVLVVAKVEKGKSKKLKSVKELLGI | |
| | TIMERSSFEKNPIDFLEAKGYKEVKKDLIIKLPKYSLFELENG | |
| | RKRMLASAGELQKGNELALPSKYVNFLYLASHYEKLKGSPE | |
| | DNEQKQLFVEQHKHYLDEIIEQISEFSKRVILADANLDKVLS | |
| | AYNKHRDKPIREQAENIIHLFTLTNLGAPAAFKYFDTTIDRKR | |
| | YTSTKEVLDATLIHQSITGLYETRIDLSQLGGDGGSGGSGGS | |
| | GGSGGSGGSGGDKKYSIGLAIGTNSVGWAVITDEYKVPSKK | |
| | FKVLGNTDRHSIKKNLIGALLFDSGETAEATRLKRTARRRYT | |
| | RRKNRICYLQEIFSNEMAKVDDSFFHRLEESFLVEEDKKHER | |
| | HPIFGNIVDEVAYHEKYPTIYHLRKKLVDSTDKADLRLIYLA | |
| | LAHMIKFRGHFLIEGDLNPDNSDVDKLFIQLVQTYNQLFEEN | |
| | PINASGVDAKAILSARLSKSRRLENLIAQLPGEKKNGLFGNLI | |
| | ALSLGLTPNFKSNFDLAEDAKLQLSKDTYDDDLDNLLAQIG | |
| | DQYADLFLAAKNLSDAILLSDILRVNTEITKAPLSASMIKRYD | |
| | EHHQDLTLLKALVRQQLPEKYKEIFFDQSKNGYAGYIDGGA | |
| | SQEEFYKFIKPILEKMDGTEELLVKLNREDLLRKQRTFDNGSI | |
| | PHQIHLGELHAILRRQEDFYPFLKDNREKIEKILTFRIPYYVGP | |
| | LARGNSRFAWMTRKSEETITPWNFEEVVDKGASAQSFIERM | |
| | TNFDKNLPNEKVLPKHSLLYEYFTVYNELTKVKYVTEGMR | |
| | KPAFLSGEQKKAIVDLLFKTNRKVTVKQLKEDYFKKIECFDS | |
| | VEISGVEDRFNASLGTYHDLLKIIKDKDFLDNEENEDILEDIV | |
| | LTLTLFEDREMIEERLKTYAHLFDDKVMKQLKRRRYTGWGR | |
| | LSRKLINGIRDKQSGKTILDFLKSDGFANRNFMQLIHDDSLTF | |
| | KEDIQKAQVSGQGDSLHEHIANLAGSPAIKKGILQTVKVVDE | |
| | LVKVMGRHKPENIVIEMARENQTTQKGQKNSRERMKRIEEG | |
| | IKELGSQILKEHPVENTQLQNEKLYLYYLQNGRDMYVDQEL | |
| | DINRLSDYDVDHIVPQSFLKDDSIDNKVLTRSDKNRGKSDN | |
| | VPSEEVVKKMKNYWRQLLNAKLITQRKFDNLTKAERGGLS | |
| | ELDKAGFIKRQLVETRQITKHVAQILDSRMNTKYDENDKLIR | |
| | EVKVITLKSKLVSDFRKDFQFYKVREINNYHHAHDAYLNAV | |
| | VGTALIKKYPKLESEFVYGDYKVYDVRKMIAKSEQEIGKAT | |
| | AKYFFYS | |
| CP1249 | PEDNEQKQLFVEQHKHYLDEIIEQISEFSKRVILADANLDKV | SEQ ID NO: |
| | LSAYNKHRDKPIREQAENIIHLFTLTNLGAPAAFKYFDTTIDR | 399 |
| | KRYTSTKEVLDATLIHQSITGLYETRIDLSQLGGDGGSGGSG | |
| | GSGGSGGSGGSGGMDKKYSIGLAIGTNSVGWAVITDEYKVP | |
| | SKKFKVLGNTDRHSIKKNLIGALLFDSGETAEATRLKRTARR | |
| | RYTRRKNRICYLQEIFSNEMAKVDDSFFHRLEESFLVEEDKK | |
| | HERHPIFGNIVDEVAYHEKYPTIYHLRKKLVDSTDKADLRLI | |
| | YLALAHMIKFRGHFLIEGDLNPDNSDVDKLFIQLVQTYNQLF | |
| | EENPINASGVDAKAILSARLSKSRRLENLIAQLPGEKKNGLF | |
| | GNLIALSLGLTPNFKSNFDLAEDAKLQLSKDTYDDDLDNLL | |
| | AQIGDQYADLFLAAKNLSDAILLSDILRVNTEITKAPLSASMI | |
| | KRYDEHHQDLTLLKALVRQQLPEKYKEIFFDQSKNGYAGYI | |
| | DGGASQEEFYKFIKPILEKMDGTEELLVKLNREDLLRKQRTF | |
| | DNGSIPHQIHLGELHAILRRQEDFYPFLKDNREKIEKILTFRIP | |
| | YYVGPLARGNSRFAWMTRKSEETITPWNFEEVVDKGASAQ | |
| | SFIERMTNFDKNLPNEKVLPKHSLLYEYFTVYNELTKVKYV | |
| | TEGMRKPAFLSGEQKKAIVDLLFKTNRKVTVKQLKEDYFKK | |
| | IECFDSVEISGVEDRFNASLGTYHDLLKIIKDKDFLDNEENED | |
| | ILEDIVLTLTLFEDREMIEERLKTYAHLFDDKVMKQLKRRRY | |
| | TGWGRLSRKLINGIRDKQSGKTILDFLKSDGFANRNFMQLIH | |
| | DDSLTFKEDIQKAQVSGQGDSLHEHIANLAGSPAIKKGILQT | |
| | VKVVDELVKVMGRHKPENIVIEMARENQTTQKGQKNSRER | |
| | MKRIEEGIKELGSQILKEHPVENTQLQNEKLYLYYLQNGRD | |
| | MYVDQELDINRLSDYDVDHIVPQSFLKDDSIDNKVLTRSDK | |
| | NRGKSDNVPSEEVVKKMKNYWRQLLNAKLITQRKFDNLTK | |
| | AERGGLSELDKAGFIKRQLVETRQITKHVAQILDSRMNTKY | |
| | DENDKLIREVKVITLKSKLVSDFRKDFQFYKVREINNYHHA | |
| | HDAYLNAVVGTALIKKYPKLESEFVYGDYKVYDVRKMIAK | |
| | SEQEIGKATAKYFFYSNIMNFFKTEITLANGEIRKRPLIETNGE | |
| | TGEIVWDKGRDFATVRKVLSMPQVNIVKKTEVQTGGFSKES | |
| | ILPKRNSDKLIARKKDWDPKKYGGFDSPTVAYSVLVVAKVE | |
| | KGKSKKLKSVKELLGITIMERSSFEKNPIDFLEAKGYKEVKK | |
| | DLIIKLPKYSLFELENGRKRMLASAGELQKGNELALPSKYV | |
| | NFLYLASHYEKLKGS | |
| CP1300 | KPIREQAENIIHLFTLTNLGAPAAFKYFDTTIDRKRYTSTKEV | SEQ ID NO: |
| | LDATLIHQSITGLYETRIDLSQLGGDGGSGGSGGSGGSGGSG | 400 |
| | GSGGDKKYSIGLAIGTNSVGWAVITDEYKVPSKKFKVLGNT | |
| | DRHSIKKNLIGALLFDSGETAEATRLKRTARRRYTRRKNRIC | |
| | YLQEIFSNEMAKVDDSFFHRLEESFLVEEDKKHERHPIFGNIV | |
| | DEVAYHEKYPTIYHLRKKLVDSTDKADLRLIYLALAHMIKFR | |
| | GHFLIEGDLNPDNSDVDKLFIQLVQTYNQLFEENPINASGVD | |
| | AKAILSARLSKSRRLENLIAQLPGEKKNGLFGNLIALSLGLTP | |
| | NFKSNFDLAEDAKLQLSKDTYDDDLDNLLAQIGDQYADLFL | |
| | AAKNLSDAILLSDILRVNTEITKAPLSASMIKRYDEHHQDLTL | |
| | LKALVRQQLPEKYKEIFFDQSKNGYAGYIDGGASQEEFYKFI | |
| | KPILEKMDGTEELLVKLNREDLLRKQRTFDNGSIPHQIHLGE | |
| | LHAILRRQEDFYPFLKDNREKIEKILTFRIPYYVGPLARGNSR | |
| | FAWMTRKSEETITPWNFEEVVDKGASAQSFIERMTNFDKNL | |
| | PNEKVLPKHSLLYEYFTVYNELTKVKYVTEGMRKPAFLSGE | |
| | QKKAIVDLLFKTNRKVTVKQLKEDYFKKIECFDSVEISGVED | |
| | RFNASLGTYHDLLKIIKDKDFLDNEENEDILEDIVLTLTLFED | |
| | REMIEERLKTYAHLFDDKVMKQLKRRRYTGWGRLSRKLIN | |
| | GIRDKQSGKTILDFLKSDGFANRNFMQLIHDDSLTFKEDIQK | |
| | AQVSGQGDSLHEHIANLAGSPAIKKGILQTVKVVDELVKVM | |
| | GRHKPENIVIEMARENQTTQKGQKNSRERMKRIEEGIKELGS | |
| | QILKEHPVENTQLQNEKLYLYYLQNGRDMYVDQELDINRLS | |
| | DYDVDHIVPQSFLKDDSIDNKVLTRSDKNRGKSDNVPSEEV | |
| | VKKMKNYWRQLLNAKLITQRKFDNLTKAERGGLSELDKAG | |
| | FIKRQLVETRQITKHVAQILDSRMNTKYDENDKLIREVKVIT | |
| | LKSKLVSDFRKDFQFYKVREINNYHHAHDAYLNAVVGTALI | |
| | KKYPKLESEFVYGDYKVYDVRKMIAKSEQEIGKATAKYFFY | |
| | SNIMNFFKTEITLANGEIRKRPLIETNGETGEIVWDKGRDFAT | |
| | VRKVLSMPQVNIVKKTEVQTGGFSKESILPKRNSDKLIARKK | |
| | DWDPKKYGGFDSPTVAYSVLVVAKVEKGKSKKLKSVKELL | |
| | GITIMERSSFEKNPIDFLEAKGYKEVKKDLIIKLPKYSLFELE | |
| | NGRKRMLASAGELQKGNELALPSKYVNFLYLASHYEKLKG | |
| | SPEDNEQKQLFVEQHKHYLDEIIEQISEFSKRVILADANLDK | |
| | VLSAYNKHRD | |

[0315] The Cas9 circular permutants that may be useful in the base editor constructs described herein. Exemplary C-terminal fragments of Cas9, based on the Cas9 of SEQ ID NO: 326, which may be rearranged to an N-terminus of Cas9, are provided below. It should be appreciated that such C-terminal fragments of Cas9 are exemplary and are not meant to be limiting. These exemplary CP-Cas9 fragments have the following sequences:

| CP name | Sequence | SEQ ID NO: |
|---|---|---|
| CP1012 C- | DYKVYDVRKMIAKSEQEIGKATAKYFFYSNIMNFFKTEITLA | SEQ ID NO: |
| terminal | NGEIRKRPLIETNGETGEIVWDKGRDFATVRKVLSMPQVNIV | 401 |
| fragment | KKTEVQTGGFSKESILPKRNSDKLIARKKDWDPKKYGGFDS | |
| | PTVAYSVLVVAKVEKGKSKKLKSVKELLGITIMERSSFEKNPI | |
| | DFLEAKGYKEVKKDLIIKLPKYSLFELENGRKRMLASAGEL | |
| | QKGNELALPSKYVNFLYLASHYEKLKGSPEDNEQKQLFVEQ | |
| | HKHYLDEIIEQISEFSKRVILADANLDKVLSAYNKHRDKPIRE | |
| | QAENIIHLFTLTNLGAPAAFKYFDTTIDRKRYTSTKEVLDATL | |
| | IHQSITGLYETRIDLSQLGGD | |
| CP1028 C- | EIGKATAKYFFYSNIMNFFKTEITLANGEIRKRPLIETNGETG | SEQ ID NO: |
| terminal | EIVWDKGRDFATVRKVLSMPQVNIVKKTEVQTGGFSKESILP | 402 |
| fragment | KRNSDKLIARKKDWDPKKYGGFDSPTVAYSVLVVAKVEKG | |
| | KSKKLKSVKELLGITIMERSSFEKNPIDFLEAKGYKEVKKDLI | |
| | IKLPKYSLFELENGRKRMLASAGELQKGNELALPSKYVNFL | |
| | YLASHYEKLKGSPEDNEQKQLFVEQHKHYLDEIIEQISEFSK | |
| | RVILADANLDKVLSAYNKHRDKPIREQAENIIHLFTLTNLGA | |
| | PAAFKYFDTTIDRKRYTSTKEVLDATLIHQSITGLYETRIDLS | |
| | QLGGD | |
| CP1041 C- | NIMNFFKTEITLANGEIRKRPLIETNGETGEIVWDKGRDFATV | SEQ ID NO: |
| terminal | RKVLSMPQVNIVKKTEVQTGGFSKESILPKRNSDKLIARKKD | 403 |
| fragment | WDPKKYGGFDSPTVAYSVLVVAKVEKGKSKKLKSVKELLGI | |
| | TIMERSSFEKNPIDFLEAKGYKEVKKDLIIKLPKYSLFELENG | |
| | RKRMLASAGELQKGNELALPSKYVNFLYLASHYEKLKGSPE | |
| | DNEQKQLFVEQHKHYLDEIIEQISEFSKRVILADANLDKVLS | |
| | AYNKHRDKPIREQAENIIHLFTLTNLGAPAAFKYFDTTIDRKR | |
| | YTSTKEVLDATLIHQSITGLYETRIDLSQLGGD | |
| CP1249 C- | PEDNEQKQLFVEQHKHYLDEIIEQISEFSKRVILADANLDKV | SEQ ID NO: |
| terminal | LSAYNKHRDKPIREQAENIIHLFTLTNLGAPAAFKYFDTTIDR | 404 |
| fragment | KRYTSTKEVLDATLIHQSITGLYETRIDLSQLGGD | |
| CP1300 C- | KPIREQAENIIHLFTLTNLGAPAAFKYFDTTIDRKRYTSTKEV | SEQ ID NO: |
| terminal | LDATLIHQSITGLYETRIDLSQLGGD | 405 |
| fragment | | |

[0316] In some embodiments, the napDNAbp domain comprises a combination of more than one Cas homolog or variant, such as a circularly permuted Cas variant. In some embodiments, the napDNAbp domain comprises a first Cas variant and a second Cas variant. In some embodiments, the napDNAbp domain comprises a first Cas variant comprising a Cas9-NG and a second Cas variant comprising a Cas9-CP1041 variant. The combination of the CP1041 variant and the NG variant enables both broadened PAM targeting and an expanded editing window. Such a domain is referred to herein as “SpCas9-NG-CP1041.” In some embodiments, the napDNAbp domain comprises an amino acid sequence that has at least 80%, at least 8%, at least 90%, at least 92.5%, at least 95%, at least 97.5%, at least 98%, or at least 99% sequence identity to SEQ ID NO: 463. In some embodiments, the napDNAbp domain comprises the sequence of SEQ ID NO: 463.

(SEQ ID NO: 463)
NIMNFFKTEITLANGEIRKRPLIETNGETGEIVWDKGRDFATVRKVLSMPQVNIVKKT
EVQTGGFSKESIRPKRNSDKLIARKKDWDPKKYGGFVSPTVAYSVLVVAKVEKGKS
KKLKSVKELLGITIMERSSFEKNPIDFLEAKGYKEVKKDLIIKLPKYSLFELENGRKRM
LASARFLQKGNELALPSKYVNFLYLASHYEKLKGSPEDNEQKQLFVEQHKHYLDEII
EQISEFSKRVILADANLDKVLSAYNKHRDKPIREQAENIIHLFTLTNLGAPRAFKYFDT
TIDRKVYRSTKEVLDATLIHQSITGLYETRIDLSQLGGDGGSGGSGGSGGSGGSGGSG
GDKKYSIGLAIGTNSVGWAVITDEYKVPSKKFKVLGNTDRHSIKKNLIGALLFDSGET
AEATRLKRTARRRYTRRKNRICYLQEIFSNEMAKVDDSFFHRLEESFLVEEDKKHER
HPIFGNIVDEVAYHEKYPTIYHLRKKLVDSTDKADLRLIYLALAHMIKFRGHFLIEGD
LNPDNSDVDKLFIQLVQTYNQLFEENPINASGVDAKAILSARLSKSRRLENLIAQLPG
EKKNGLFGNLIALSLGLTPNFKSNFDLAEDAKLQLSKDTYDDDLDNLLAQIGDQYAD
LFLAAKNLSDAILLSDILRVNTEITKAPLSASMIKRYDEHHQDLTLLKALVRQQLPEK
YKEIFFDQSKNGYAGYIDGGASQEEFYKFIKPILEKMDGTEELLVKLNREDLLRKQRT
FDNGSIPHQIHLGELHAILRRQEDFYPFLKDNREKIEKILTFRIPYYVGPLARGNSRFA
WMTRKSEETITPWNFEEVVDKGASAQSFIERMTNFDKNLPNEKVLPKHSLLYEYFTV
YNELTKVKYVTEGMRKPAFLSGEQKKAIVDLLFKTNRKVTVKQLKEDYFKKIECFD
SVEISGVEDRFNASLGTYHDLLKIIKDKDFLDNEENEDILEDIVLTLTLFEDREMIEERL
KTYAHLFDDKVMKQLKRRRYTGWGRLSRKLINGIRDKQSGKTILDFLKSDGFANRN
FMQLIHDDSLTFKEDIQKAQVSGQGDSLHEHIANLAGSPAIKKGILQTVKVVDELVK
VMGRHKPENIVIEMARENQTTQKGQKNSRERMKRIEEGIKELGSQILKEHPVENTQL
QNEKLYLYYLQNGRDMYVDQELDINRLSDYDVDHIVPQSFLKDDSIDNKVLTRSDK
NRGKSDNVPSEEVVKKMKNYWRQLLNAKLITQRKFDNLTKAERGGLSELDKAGFIK
RQLVETRQITKHVAQILDSRMNTKYDENDKLIREVKVITLKSKLVSDFRKDFQFYKV
REINNYHHAHDAYLNAVVGTALIKKYPKLESEFVYGDYKVYDVRKMIAKSEQEIGK
ATAKYFFYS

[0317] In some embodiments, the napDNAbp domain comprises a first Cas variant comprising a Cas9-VRQR and a second Cas variant comprising a Cas9-CP1041 variant. Such a domain is referred to herein as “SpCas9-NG-VRQR.” In some embodiments, the napDNAbp domain comprises an amino acid sequence that has at least 80%, at least 8%, at least 90%, at least 92.5%, at least 95%, at least 97.5%, at least 98%, or at least 99% sequence identity to SEQ ID NO: 464. In some embodiments, the napDNAbp domain comprises the sequence of SEQ ID NO: 464.

(SEQ ID NO: 464)
NIMNFFKTEITLANGEIRKRPLIETNGETGEIVWDKGRDFATVRKVLSMPQ
VNIVKKTEVQTGGFSKESIRPKRNSDKLIARKKDWDPKKYGGFVSPTVAYSVLVVA
KVEKGKSKKLKSVKELLGITIMERSSFEKNPIDFLEAKGYKEVKKDLIIKLPKYSLFEL
ENGRKRMLASARFLQKGNELALPSKYVNFLYLASHYEKLKGSPEDNEQKQLFVEQH
KHYLDEIIEQISEFSKRVILADANLDKVLSAYNKHRDKPIREQAENIIHLFTLTNLGAP
RAFKYFDTTIDRKVYRSTKEVLDATLIHQSITGLYETRIDLSQLGGDGGSGGSGGSGG
SGGSGGSGGDKKYSIGLAIGTNSVGWAVITDEYKVPSKKFKVLGNTDRHSIKKNLIG
ALLFDSGETAEATRLKRTARRRYTRRKNRICYLQEIFSNEMAKVDDSFFHRLEESFLV
EEDKKHERHPIFGNIVDEVAYHEKYPTIYHLRKKLVDSTDKADLRLIYLALAHMIKFR
GHFLIEGDLNPDNSDVDKLFIQLVQTYNQLFEENPINASGVDAKAILSARLSKSRRLE
NLIAQLPGEKKNGLFGNLIALSLGLTPNFKSNFDLAEDAKLQLSKDTYDDDLDNLLA
QIGDQYADLFLAAKNLSDAILLSDILRVNTEITKAPLSASMIKRYDEHHQDLTLLKAL
VRQQLPEKYKEIFFDQSKNGYAGYIDGGASQEEFYKFIKPILEKMDGTEELLVKLNRE
DLLRKQRTFDNGSIPHQIHLGELHAILRRQEDFYPFLKDNREKIEKILTFRIPYYVGPLA
RGNSRFAWMTRKSEETITPWNFEEVVDKGASAQSFIERMTNFDKNLPNEKVLPKHSL
LYEYFTVYNELTKVKYVTEGMRKPAFLSGEQKKAIVDLLFKTNRKVTVKQLKEDYF
KKIECFDSVEISGVEDRFNASLGTYHDLLKIIKDKDFLDNEENEDILEDIVLTLTLFEDR
EMIEERLKTYAHLFDDKVMKQLKRRRYTGWGRLSRKLINGIRDKQSGKTILDFLKSD
GFANRNFMQLIHDDSLTFKEDIQKAQVSGQGDSLHEHIANLAGSPAIKKGILQTVKV
VDELVKVMGRHKPENIVIEMARENQTTQKGQKNSRERMKRIEEGIKELGSQILKEHP
VENTQLQNEKLYLYYLQNGRDMYVDQELDINRLSDYDVDHIVPQSFLKDDSIDNKV
LTRSDKNRGKSDNVPSEEVVKKMKNYWRQLLNAKLITQRKFDNLTKAERGGLSELD
KAGFIKRQLVETRQITKHVAQILDSRMNTKYDENDKLIREVKVITLKSKLVSDFRKDF
QFYKVREINNYHHAHDAYLNAVVGTALIKKYPKLESEFVYGDYKVYDVRKMIAKSE
QEIGKATAKYFFYS

High Fidelity Cas9 Domains and Variants Thereof that Display Higher Specificity

[0318] Some aspects of the disclosure provide high fidelity Cas9 (HFCas9) domains of the fusion proteins provided herein. In some embodiments, high fidelity Cas9 domains are engineered Cas9 domains comprising one or more mutations that decrease electrostatic interactions between the Cas9 domain and the sugar-phosphate backbone of DNA, as compared to a corresponding wild-type Cas9 domain. Without wishing to be bound by any particular theory, high fidelity Cas9 domains that have decreased electrostatic interactions with the sugar-phosphate backbone of DNA may have less off-target effects. In some embodiments, the Cas9 domain (e.g., a wild type Cas9 domain) comprises one or more mutations that decrease the association between the Cas9 domain and the sugar-phosphate backbone of DNA. In some embodiments, a Cas9 domain comprises one or more mutations that decreases the association between the Cas9 domain and the sugar-phosphate backbone of DNA by at least 1%, at least 2%, at least 3%, at least 4%, at least 5%, at least 10%, at least 15%, at least 20%, at least 25%, at least 30%, at least 35%, at least 40%, at least 45%, at least 50%, at least 55%, at least 60%, at least 65%, at least 70%, or more.

[0319] In some embodiments, any of the Cas9 fusion proteins provided herein comprise one or more of N497X, R661X, Q695X, and/or Q926X mutation of the amino acid sequence provided in SEQ ID NO: 6, or corresponding mutation(s) in any Cas9 provided herein, such as any of the amino acid sequences provided in SEQ ID NOs: 4-26, wherein X is any amino acid. In some embodiments, any of the Cas9 fusion proteins provided herein comprise one or more of N497A, R661A, Q695A, and/or Q926A mutation of the amino acid sequence provided in SEQ ID NO: 6, or a corresponding mutation in any Cas9 provided herein, such as any of the amino acid sequences provided in SEQ ID NOs: 4-26. In some embodiments, any of the Cas9 fusion proteins provided herein comprise one or more of D10A, N497A, R661A, Q695A, and/or Q926A mutation of the amino acid sequence provided in SEQ ID NO: 6, such as any of the amino acid sequences provided in SEQ ID NOs: 4-26. In some embodiments, the Cas9 domain (e.g., of any of the fusion proteins provided herein) comprises the amino acid sequence as set forth in SEQ ID NO: 20. In some embodiments, the Cas9 domain comprises an amino acid sequence that is at least 60%, at least 65%, at least 70%, at least 75%, at least 80%, at least 85%, at least 90%, at least 95%, at least 96%, at least 97%, at least 98%, at least 99%, or at least 99.5% identical to SEQ ID NO: 20. Cas9 domains with high fidelity are known in the art and would be apparent to the skilled artisan. For example, Cas9 domains with high fidelity have been described in Kleinstiver, B. P., et al. “High-fidelity CRISPR-Cas9 nucleases with no detectable genome-wide off-target effects.” Nature 529, 490-495 (2016); and Slaymaker, I. M., et al. “Rationally engineered Cas9 nucleases with improved specificity.” Science 351, 84-88 (2015); the entire contents of each are incorporated herein by reference.

[0320] It should be appreciated that any of the base editors (or fusion proteins) provided herein, for example, any of the C to G base editors provided herein, may be converted into high fidelity base editors by modifying the Cas9 domain as described herein to generate high fidelity base editors, for example, a high fidelity C to G base editor. In some embodiments, the high fidelity Cas9 domain is a dCas9 domain. In some embodiments, the high fidelity Cas9 domain is a nCas9 domain (HF-nCas9) (i.e., HF1, SEQ ID NO: 20).

[0321] In some embodiments, the napDNAbp domain of any of the disclosed CGBEs is a Hypa-Cas9 domain. The Hypa-Cas9 domain contains N692A, M694A, Q695A, D1135E mutations in the amino acid sequence provided in SEQ ID NO: 6 (SEQ ID NO: 727), or a corresponding mutation in any Cas9 provided herein, such as any of the amino acid sequences provided in SEQ ID NOs: 4-26. Hypa-Cas9 is described in further detail in Ikeda et al., Communications Biology Vol. 2: 371 (2019) and Chen, J. S. et al., Nature 550, 407-410 (2017), each of which is incorporated bu reference herein. HypaCas9 demonstrates a high ratio of on-target to off-target cleavage activity. The Hypa-nCas9 domain contains D10A, N692A, M694A, Q695A, D1135E mutations relative to the amino acid sequence provided in SEQ ID NO: 6 (SEQ ID NO: 728), or a corresponding mutation in any Cas9 provided herein, such as any of the amino acid sequences provided in SEQ ID NOs: 4-26.

[0322] In some embodiments, the napDNAbp domain of any of the disclosed CGBEs contains a combination of substitutions from high fidelity Cas9 HF1 and from HypaCas9, or an HF-Hypa-Cas9 domain. In some embodiments, the napDNAbp domain is nickase domain that is an HF-Hypa-Cas9 nickase domain (SEQ ID NO: 731), which contains the D10A, N692A, M694A, Q695A, D1135E mutations relative to the amino acid sequence provided in SEQ ID NO: 6, or a corresponding mutation in any Cas9 provided herein, such as any of the amino acid sequences provided in SEQ ID NOs: 4-26.

[0323] In some embodiments, the napDNAbp domain of any of the disclosed CGBEs is an e-Cas9 domain, such as an e-SpCas9 domain, or e-SpCas9(1.1) (SEQ ID NO: 726). The e-Cas9 domain contains K848A, K1003A, and R1060A mutations in the amino acid sequence provided in SEQ ID NO: 6, or a corresponding mutation in any Cas9 provided herein, such as any of the amino acid sequences provided in SEQ ID NOs: 4-26. e-Cas9 is described in further detail in Anzalone, Koblan & Liu, Nature Biotechnology Vol. 38, 824-844 (2020), which is incorporated by reference herein. e-SpCas9(1.1) was discovered through alanine scanning of positively charged residues that line the non-target-strand binding groove, with the hypothesis that interrupting interactions between these residues and the negatively charged nucleic acid backbone would decrease binding affinity. After screening mutants, the combination of K848A, K1003A and R1060A mutations was chosen, and the resulting e-SpCas9(1.1) variant displayed efficient and precise genome editing in human cells. The e-Cas9 variant may also be provided as a nickase. The e-Cas9n domain contains D10A, K848A, K1003A, and R1060A mutations in the amino acid sequence provided in SEQ ID NO: 6, or a corresponding mutation in any Cas9 provided herein, such as any of the amino acid sequences provided in SEQ ID NOs: 4-26.

[0324] An enhanced fidelity variant has been engineered combining mutations found in e-SpCas9(1.1) and SpCas9-HF1 (see Kulcsir, P. I. et al. Genome Biol. 18, 190 (2017)). Accordingly, in some embodiments, the napDNAbp domain is Cas9 variant containing a combination of substitutions from e-Cas9 and HypaCas9, or an e-Hypa-Cas9 domain (or HeFSpCas9 domain). The e-Hypa-SpCas9 domain (SEQ ID NO: 730) contains K848A, K1003A, R1060A, N692A, M694A, Q695A, and D1135E substitutions in SEQ ID NO: 6. The e-Hypa-nCas9 domain contains D10A, K848A, K1003A, R1060A, N692A, M694A, Q695A, and D1135E substitutions in SEQ ID NO: 6. In some embodiments, the napDNAbp domain is an e-Cas9 combined with a HF-nCas9, i.e., an e-HF-nCas9 domain, such as the e-HF-SpCas9n domain of SEQ ID NO: 729. In some embodiments, the napDNAbp domain is an e-Cas9 combined with a HF-Hypa-nCas9, or an e-HF-Hypa-nCas9 domain. The e-Hypa-HF-SpCas9n domain (SEQ ID NO: 732) contains D10A, K848A, K1003A, R1060A, N497A, R661A, Q695A, Q926A, N692A, M694A, Q695A, and D1135E substitutions in SEQ ID NO: 6.

[0325] It will be appreciated that all of of the disclosed Cas9 variants for use in the napDNAbp domains of the provided CGBEs can be engineered to have nickase activity (e.g., to contain a D10A substitution) or can be engineered to be nuclease-inactive (e.g., to contain D10A and H840A substitutions).

[0326] In some embodiments, the napDNAbp domain of any of the disclosed CGBEs comprises an amino acid sequence that is at least 85%, 90%, 92.5%, 95%, 97%, 98%, or 99% identical to any of the sequences set forth as SEQ ID NOs: 20 and 726-727, 729-732. In some embodiments, the napDNAbp domain of any of the disclosed CGBEs is selected from SEQ ID NOs: 20 and 726-727, 729-732.

[0327] The High Fidelity Cas9 nickase domain (HF-nCas9), where mutations relative to Cas9 of SEQ ID NO: 6 are shown in bold and underline:

(SEQ ID NO: 20)
DKKYSIGLAIGTNSVGWAVITDEYKVPSKKFKVLGNTDRHSIKKNLIGALLFDSGETA
EATRLKRTARRRYTRRKNRICYLQEIFSNEMAKVDDSFFHRLEESFLVEEDKKHERH
PIFGNIVDEVAYHEKYPTIYHLRKKLVDSTDKADLRLIYLALAHMIKFRGHFLIEGDL
NPDNSDVDKLFIQLVQTYNQLFEENPINASGVDAKAILSARLSKSRRLENLIAQLPGE
KKNGLFGNLIALSLGLTPNFKSNFDLAEDAKLQLSKDTYDDDLDNLLAQIGDQYADL
FLAAKNLSDAILLSDILRVNTEITKAPLSASMIKRYDEHHQDLTLLKALVRQQLPEKY
KEIFFDQSKNGYAGYIDGGASQEEFYKFIKPILEKMDGTEELLVKLNREDLLRKQRTF
DNGSIPHQIHLGELHAILRRQEDFYPFLKDNREKIEKILTFRIPYYVGPLARGNSRFAW
MTRKSEETITPWNFEEVVDKGASAQSFIERMTAFDKNLPNEKVLPKHSLLYEYFTVY
NELTKVKYVTEGMRKPAFLSGEQKKAIVDLLFKTNRKVTVKQLKEDYFKKIECFDS
VEISGVEDRFNASLGTYHDLLKIIKDKDFLDNEENEDILEDIVLTLTLFEDREMIEERL
KTYAHLFDDKVMKQLKRRRYTGWGALSRKLINGIRDKQSGKTILDFLKSDGFANRN
FMALIHDDSLTFKEDIQKAQVSGQGDSLHEHIANLAGSPAIKKGILQTVKVVDELVK
VMGRHKPENIVIEMARENQTTQKGQKNSRERMKRIEEGIKELGSQILKEHPVENTQL
QNEKLYLYYLQNGRDMYVDQELDINRLSDYDVDHIVPQSFLKDDSIDNKVLTRSDK
NRGKSDNVPSEEVVKKMKNYWRQLLNAKLITQRKFDNLTKAERGGLSELDKAGFIK
RQLVETRAITKHVAQILDSRMNTKYDENDKLIREVKVITLKSKLVSDFRKDFQFYKV
REINNYHHAHDAYLNAVVGTALIKKYPKLESEFVYGDYKVYDVRKMIAKSEQEIGK
ATAKYFFYSNIMNFFKTEITLANGEIRKRPLIETNGETGEIVWDKGRDFATVRKVLSM
PQVNIVKKTEVQTGGFSKESILPKRNSDKLIARKKDWDPKKYGGFDSPTVAYSVLVV
AKVEKGKSKKLKSVKELLGITIMERSSFEKNPIDFLEAKGYKEVKKDLIIKLPKYSLFE
LENGRKRMLASAGELQKGNELALPSKYVNFLYLASHYEKLKGSPEDNEQKQLFVEQ
HKHYLDEIIEQISEFSKRVILADANLDKVLSAYNKHRDKPIREQAENIIHLFTLTNLGA
PAAFKYFDTTIDRKRYTSTKEVLDATLIHQSITGLYETRIDLSQLGGD

### Other Cas9 Equivalents

[0328] In some embodiments, the base editors described herein can include any Cas9 equivalent. As used herein, the term “Cas9 equivalent” is a broad term that encompasses any napDNAbp protein that serves the same function as Cas9 in the present base editors despite that its amino acid primary sequence and/or its three-dimensional structure may be different and/or unrelated from an evolutionary standpoint. Thus, while Cas9 equivalents include any Cas9 ortholog, homolog, mutant, or variant described or embraced herein that are evolutionarily related, the Cas9 equivalents also embrace proteins that may have evolved through convergent evolution processes to have the same or similar function as Cas9, but which do not necessarily have any similarity with regard to amino acid sequence and/or three dimensional structure. The base editors described here embrace any Cas9 equivalent that would provide the same or similar function as Cas9 despite that the Cas9 equivalent may be based on a protein that arose through convergent evolution.

[0329] For example, CasX is a Cas9 equivalent that reportedly has the same function as Cas9 but which evolved through convergent evolution. Thus, the CasX protein described in Liu et al., “CasX enzymes comprises a distinct family of RNA-guided genome editors,” Nature, 2019, Vol. 566: 218-223, is contemplated to be used with the base editors described herein. In addition, any variant or modification of CasX is conceivable and within the scope of the present disclosure.

[0330] Cas9 is a bacterial enzyme that evolved in a wide variety of species. However, the Cas9 equivalents contemplated herein may also be obtained from archaea, which constitute a domain and kingdom of single-celled prokaryotic microbes different from bacteria.

[0331] In some embodiments, Cas9 equivalents may refer to CasX or CasY, which have been described in, for example, Burstein et al., “New CRISPR-Cas systems from uncultivated microbes.” Cell Res. 2017 Feb. 21. doi: 10.1038/cr.2017.21, the entire contents of which is hereby incorporated by reference. Using genome-resolved metagenomics, a number of CRISPR-Cas systems were identified, including the first reported Cas9 in the archaeal domain of life. This divergent Cas9 protein was found in little-studied nanoarchaea as part of an active CRISPR-Cas system. In bacteria, two previously unknown systems were discovered, CRISPR-CasX and CRISPR-CasY, which are among the most compact systems yet discovered. In some embodiments, Cas9 refers to CasX, or a variant of CasX. In some embodiments, Cas9 refers to a CasY, or a variant of CasY. It should be appreciated that other RNA-guided DNA binding proteins may be used as a nucleic acid programmable DNA binding protein (napDNAbp), and are within the scope of this disclosure. Also see Liu et al., “CasX enzymes comprises a distinct family of RNA-guided genome editors,” Nature, 2019, Vol. 566: 218-223. Any of these Cas9 equivalents are contemplated.

[0332] In some embodiments, the Cas9 equivalent comprises an amino acid sequence that is at least 85%, at least 90%, at least 91%, at least 92%, at least 93%, at least 94%, at least 95%, at least 96%, at least 97%, at least 98%, at least 99%, or at least 99.5% identical to a naturally-occurring CasX or CasY protein. In some embodiments, the napDNAbp is a naturally-occurring CasX or CasY protein. In some embodiments, the napDNAbp comprises an amino acid sequence that is at least 85%, at least 90%, at least 91%, at least 92%, at least 93%, at least 94%, at least 95%, at least 96%, at least 97%, at least 98%, at least 99%, or at least 99.5% identical to a wild-type Cas moiety or any Cas moiety provided herein.

[0333] In various embodiments, the nucleic acid programmable DNA binding proteins include, without limitation, Cas9 (e.g., dCas9 and nCas9), CasX, CasY, Cpf1, C2c1, C2c2, C2C3, Argonaute, Cas12a, and Cas12b. One example of a nucleic acid programmable DNA-binding protein that has different PAM specificity than Cas9 is Clustered Regularly Interspaced Short Palindromic Repeats from Prevotella and Francisella 1 (Cpf1). Similar to Cas9, Cpf1 is also a class 2 CRISPR effector. It has been shown that Cpf1 mediates robust DNA interference with features distinct from Cas9. Cpf1 is a single RNA-guided endonuclease lacking tracrRNA, and it utilizes a T-rich protospacer-adjacent motif (TTN, TTTN (SEQ ID NO: 215), or YTN). Moreover, Cpf1 cleaves DNA via a staggered DNA double-stranded break. Out of 16 Cpf1-family proteins, two enzymes from Acidaminococcus and Lachnospiraceae are shown to have efficient genome-editing activity in human cells. Cpf1 proteins are known in the art and have been described previously, for example Yamano et al., “Crystal structure of Cpf1 in complex with guide RNA and target DNA.” Cell (165) 2016, p. 949-962; the entire contents of which is hereby incorporated by reference. The state of the art may also now refer to Cpf1 enzymes as Cas12a.

[0334] In still other embodiments, the Cas protein may include any CRISPR associated protein, including but not limited to, Cas12a, Cas12b, Cas1, Cas1B, Cas2, Cas3, Cas4, Cas5, Cas6, Cas7, Cas8, Cas9 (also known as Csn1 and Csx12), Cas10, Csy1, Csy2, Csy3, Cse1, Cse2, Csc1, Csc2, Csa5, Csn2, Csm2, Csm3, Csm4, Csm5, Csm6, Cmr1, Cmr3, Cmr4, Cmr5, Cmr6, Csb1, Csb2, Csb3, Csx17, Csx14, Csx10, Csx16, CsaX, Csx3, Csx1, Csx15, Csf1, Csf2, Csf3, Csf4, homologs thereof, or modified versions thereof, and preferably comprising a nickase mutation (e.g., a mutation corresponding to the D10A mutation of the wild type SpCas9 polypeptide of SEQ ID NO: 326).

[0335] In various other embodiments, the napDNAbp domain may be any of the following proteins: a Cas9, a Cpf1, a CasX, a CasY, a C2c1, a C2c2, a C2c3, a GeoCas9, a CjCas9, a Cas12a, a Cas12b, a Cas12g, a Cas12h, a Cas12i, a Cas13a, a Cas13b, a Cas13c, a Cas13d, a Cas14 (Cas12f), a Csn2, an xCas9, an SpCas9-NG, an nCas9-NG, a high-fidelity Cas9 (HFCas9), a HypaCas9, an e-Cas9, an e-HypaCas9, a HF-nCas9, a HF-nCas9-NG, a Sniper-nCas9, an HF-Hypa-nCas9, an e-HF-Hypa-nCas9, a circularly permuted Cas9 domain such as CP1012, CP1028, CP1041, CP1249, and CP1300, or an Argonaute (Ago) domain, a Cas9-KKH, a SmacCas9, a Spy-macCas9, an SpCas9-VRQR, an SpCas9-VRER, an SpCas9-VQR, an SpCas9-EQR, an SpCas9-NRRH, an SpaCas9-NRTH, an SpCas9-NRCH. In some embodiments, the napDNAbp domain may be any of the following proteins: an LbCas12a, an AsCas12a, a CeCas12a, an MbCas12a, a Cas(D (Cas12j), an SpCas9-NG-CP1041, an SpCas9-NG-VRQR, a CasMINI, a Cas7-11, an NmeCas9, an Nme2Cas9, a SauriCas9, an StCas9, a TdCas9, a SuperFi-Cas9, or a variant thereof.

[0336] In some embodiments, the napDNAbp domain is selected from an nCas9, an nCas9-NG, an HF-Cas9, a HypaCas9, a HF-nCas9, a HF-nCas9-NG, an HF-Hypa-nCas9, an e-HF-Hypa-nCas9, and an e-HypaCas9. In particular embodiments, the napDNAbp domain is an HF-nCas9, a HF-nCas9-NG, Hypa-nCas9, or an HF-Hypa-nCas9.

[0337] In certain embodiments, the base editors contemplated herein can include a Cas9 protein that is of smaller molecular weight than the canonical SpCas9 sequence. In some embodiments, the smaller-sized Cas9 variants may facilitate delivery to cells, e.g., by an expression vector, nanoparticle, or other means of delivery. The canonical SpCas9 protein is 1368 amino acids in length and has a predicted molecular weight of 158 kilodaltons. The term “small-sized Cas9 variant”, as used herein, refers to any Cas9 variant-naturally occurring, engineered, or otherwise-that is less than at least 1300 amino acids, or at least less than 1290 amino acids, or than less than 1280 amino acids, or less than 1270 amino acid, or less than 1260 amino acid, or less than 1250 amino acids, or less than 1240 amino acids, or less than 1230 amino acids, or less than 1220 amino acids, or less than 1210 amino acids, or less than 1200 amino acids, or less than 1190 amino acids, or less than 1180 amino acids, or less than 1170 amino acids, or less than 1160 amino acids, or less than 1150 amino acids, or less than 1140 amino acids, or less than 1130 amino acids, or less than 1120 amino acids, or less than 1110 amino acids, or less than 1100 amino acids, or less than 1050 amino acids, or less than 1000 amino acids, or less than 950 amino acids, or less than 900 amino acids, or less than 850 amino acids, or less than 800 amino acids, or less than 750 amino acids, or less than 700 amino acids, or less than 650 amino acids, or less than 600 amino acids, or less than 550 amino acids, or less than 500 amino acids, but at least larger than about 400 amino acids and retaining the required functions of the Cas9 protein.

[0338] In various embodiments, the base editors disclosed herein may comprise one of the small-sized Cas9 variants described as follows, or a Cas9 variant thereof having at least about 70% identical, at least about 80% identical, at least about 90% identical, at least about 95% identical, at least about 96% identical, at least about 97% identical, at least about 98% identical, at least about 99% identical, at least about 99.5% identical, or at least about 99.9% identical to any reference small-sized Cas9 protein. Exemplary small-sized Cas9 variants include, but are not limited to, SaCas9 and LbCas12a.

[0339] In some embodiments, the napDNAbp domain of any of the disclosed base editors comprises an LbCas12a, such as a wild-type LbCas12a. In some embodiments, the napDNAbp domain of any of the disclosed based editors is comprises at least 80%, at least 85%, at least 90%, at least 95%, or at least 99% sequence identity to SEQ ID NO: 381. In some embodiments, the napDNAbp domain of any of the disclosed base editors comprises the amino acid sequence of SEQ ID NO: 381.

[0340] In some embodiments, the napDNAbp domain of any of the disclosed base editors comprises an AsCas12a, such as a wild-type AsCas12a. In some embodiments, the napDNAbp domain of any of the disclosed base editors comprises a mutant AsCas12a, such as an engineered AsCas12a, or enAsCas12a. In some embodiments, the napDNAbp domain of any of the disclosed based editors is comprises at least 80%, at least 85%, at least 90%, at least 95%, or at least 99% sequence identity to SEQ ID NO: 383. In some embodiments, the napDNAbp domain of any of the disclosed base editors comprises the amino acid sequence of SEQ ID NO: 383.

| Description | Sequence | SEQ ID NO: |
|---|---|---|
| SaCas9 | MGKRNYILGLDIGITSVGYGIIDYETRDVIDAGVRLFKEANVEN | SEQ ID NO: |
| Staphylococcuss | NEGRRSKRGARRLKRRRRHRIQRVKKLLFDYNLLTDHSELSGI | 377 |
| aureus | NPYEARVKGLSQKLSEEEFSAALLHLAKRRGVHNVNEVEEDT | |
| 1053 AA | GNELSTKEQISRNSKALEEKYVAELQLERLKKDGEVRGSINRF | |
| 123 kDa | KTSDYVKEAKQLLKVQKAYHQLDQSFIDTYIDLLETRRTYYEG | |
| | PGEGSPFGWKDIKEWYEMLMGHCTYFPEELRSVKYAYNADLY | |
| | NALNDLNNLVITRDENEKLEYYEKFQIIENVFKQKKKPTLKQIA | |
| | KEILVNEEDIKGYRVTSTGKPEFTNLKVYHDIKDITARKEIIENA | |
| | ELLDQIAKILTIYQSSEDIQEELTNLNSELTQEEIEQISNLKGYTG | |
| | THNLSLKAINLILDELWHTNDNQIAIFNRLKLVPKKVDLSQQKE | |
| | IPTTLVDDFILSPVVKRSFIQSIKVINAIIKKYGLPNDIIIELAREK | |
| | NSKDAQKMINEMQKRNRQTNERIEEIIRTTGKENAKYLIEKIKL | |
| | HDMQEGKCLYSLEAIPLEDLLNNPFNYEVDHIIPRSVSFDNSFN | |
| | NKVLVKQEENSKKGNRTPFQYLSSSDSKISYETFKKHILNLAK | |
| | GKGRISKTKKEYLLEERDINRFSVQKDFINRNLVDTRYATRGL | |
| | MNLLRSYFRVNNLDVKVKSINGGFTSFLRRKWKFKKERNKGY | |
| | KHHAEDALIIANADFIFKEWKKLDKAKKVMENQMFEEKQAES | |
| | MPEIETEQEYKEIFITPHQIKHIKDFKDYKYSHRVDKKPNRKLIN | |
| | DTLYSTRKDDKGNTLIVNNLNGLYDKDNDKLKKLINKSPEKLL | |
| | MYHHDPQTYQKLKLIMEQYGDEKNPLYKYYEETGNYLTKYS | |
| | KKDNGPVIKKIKYYGNKLNAHLDITDDYPNSRNKVVKLSLKP | |
| | YRFDVYLDNGVYKFVTVKNLDVIKKENYYEVNSKCYEEAKK | |
| | LKKISNQAEFIASFYKNDLIKINGELYRVIGVNNDLLNRIEVNMI | |
| | DITYREYLENMNDKRPPHIIKTIASKTQSIKKYSTDILGNLYEVK | |
| | SKKHPQIIKK | |
| NmeCas9 | MAAFKPNSINYILGLDIGIASVGWAMVEIDEEENPIRLIDLGVR | SEQ ID NO: |
| N. meningitidis | VFERAEVPKTGDSLAMARRLARSVRRLTRRRAHRLLRTRRLL | 378 |
| 1083 AA | KREGVLQAANFDENGLIKSLPNTPWQLRAAALDRKLTPLEWS | |
| 124.5 kDa | AVLLHLIKHRGYLSQRKNEGETADKELGALLKGVAGNAHALQ | |
| | TGDFRTPAELALNKFEKESGHIRNQRSDYSHTFSRKDLQAELIL | |
| | LFEKQKEFGNPHVSGGLKEGIETLLMTQRPALSGDAVQKMLG | |
| | HCTFEPAEPKAAKNTYTAERFIWLTKLNNLRILEQGSERPLTDT | |
| | ERATLMDEPYRKSKLTYAQARKLLGLEDTAFFKGLRYGKDNA | |
| | EASTLMEMKAYHAISRALEKEGLKDKKSPLNLSPELQDEIGTA | |
| | FSLFKTDEDITGRLKDRIQPEILEALLKHISFDKFVQISLKALRRI | |
| | VPLMEQGKRYDEACAEIYGDHYGKKNTEEKIYLPPIPADEIRNP | |
| | VVLRALSQARKVINGVVRRYGSPARIHIETAREVGKSFKDRKEI | |
| | EKRQEENRKDREKAAAKFREYFPNFVGEPKSKDILKLRLYEQQ | |
| | HGKCLYSGKEINLGRLNEKGYVEIDAALPFSRTWDDSFNNKVL | |
| | VLGSENQNKGNQTPYEYFNGKDNSREWQEFKARVETSRFPRS | |
| | KKQRILLQKFDEDGFKERNLNDTRYVNRFLCQFVADRMRLTG | |
| | KGKKRVFASNGQITNLLRGFWGLRKVRAENDRHHALDAVVV | |
| | ACSTVAMQQKITRFVRYKEMNAFDGKTIDKETGEVLHQKTHF | |
| | PQPWEFFAQEVMIRVFGKPDGKPEFEEADTLEKLRTLLAEKLSS | |
| | RPEAVHEYVTPLFVSRAPNRKMSGQGHMETVKSAKRLDEGVS | |
| | VLRVPLTQLKLKDLEKMVNREREPKLYEALKARLEAHKDDPA | |
| | KAFAEPFYKYDKAGNRTQQVKAVRVEQVQKTGVWVRNHNGI | |
| | ADNATMVRVDVFEKGDKYYLVPIYSWQVAKGILPDRAVVQGK | |
| | DEEDWQLIDDSFNFKFSLHPNDLVEVITKKARMFGYFASCHRG | |
| | TGNINIRIHDLDHKIGKNGILEGIGVKTALSFQKYQIDELGKEIR | |
| | PCRLKKRPPVR | |
| CjCas9 | MARILAFDIGISSIGWAFSENDELKDCGVRIFTKVENPKTGESL | SEQ ID NO: |
| C. jejuni | ALPRRLARSARKRLARRKARLNHLKHLIANEFKLNYEDYQSF | 379 |
| 984 AA | DESLAKAYKGSLISPYELRFRALNELLSKQDFARVILHIAKRRG | |
| 114.9 kDa | YDDIKNSDDKEKGAILKAIKQNEEKLANYQSVGEYLYKEYFQ | |
| | KFKENSKEFTNVRNKKESYERCIAQSFLKDELKLIFKKQREFGF | |
| | SFSKKFEEEVLSVAFYKRALKDFSHLVGNCSFFTDEKRAPKNSP | |
| | LAFMFVALTRIINLLNNLKNTEGILYTKDDLNALLNEVLKNGTL | |
| | TYKQTKKLLGLSDDYEFKGEKGTYFIEFKKYKEFIKALGEHNL | |
| | SQDDLNEIAKDITLIKDEIKLKKALAKYDLNQNQIDSLSKLEFK | |
| | DHLNISFKALKLVTPLMLEGKKYDEACNELNLKVAINEDKKDF | |
| | LPAFNETYYKDEVTNPVVLRAIKEYRKVLNALLKKYGKVHKI | |
| | NIELAREVGKNHSQRAKIEKEQNENYKAKKDAELECEKLGLKI | |
| | NSKNILKLRLFKEQKEFCAYSGEKIKISDLQDEKMLEIDHIYPYS | |
| | RSFDDSYMNKVLVFTKQNQEKLNQTPFEAFGNDSAKWQKIEV | |
| | LAKNLPTKKQKRILDKNYKDKEQKNFKDRNLNDTRYIARLVL | |
| | NYTKDYLDFLPLSDDENTKLNDTQKGSKVHVEAKSGMLTSAL | |
| | RHTWGFSAKDRNNHLHHAIDAVIIAYANNSIVKAFSDFKKEQE | |
| | SNSAELYAKKISELDYKNKRKFFEPFSGFRQKVLDKIDEIFVSKP | |
| | ERKKPSGALHEETFRKEEEFYQSYGGKEGVLKALELGKIRKVN | |
| | GKIVKNGDMFRVDIFKHKKTNKFYAVPIYTMDFALKVLPNKAV | |
| | ARSKKGEIKDWILMDENYEFCFSLYKDSLILIQTKDMQEPEFV | |
| | YYNAFTSSTVSLIVSKHDNKFETLSKNQKILFKNANEKEVIAKS | |
| | IGIQNLKVFEKYIVSALGEVTKAEFRQREDFKK | |
| GeoCas9 | MRYKIGLDIGITSVGWAVMNLDIPRIEDLGVRIFDRAENPQTGE | SEQ ID NO: |
| G. | SLALPRRLARSARRRLRRRKHRLERIRRLVIREGILTKEELDKLF | 380 |
| stearothermophilus | EEKHEIDVWQLRVEALDRKLNNDELARVLLHLAKRRGFKSNR | |
| 1087 AA | KSERSNKENSTMLKHIEENRAILSSYRTVGEMIVKDPKFALHK | |
| 127 kDa | RNKGENYTNTIARDDLEREIRLIFSKQREFGNMSCTEEFENEYI | |
| | TIWASQRPVASKDDIEKKVGFCTFEPKEKRAPKATYTFQSFIAW | |
| | EHINKLRLISPSGARGLTDEERRLLYEQAFQKNKITYHDIRTLLH | |
| | LPDDTYFKGIVYDRGESRKQNENIRFLELDAYHQIRKAVDKVY | |
| | GKGKSSSFLPIDFDTFGYALTLFKDDADIHSYLRNEYEQNGKR | |
| | MPNLANKVYDNELIEELLNLSFTKFGHLSLKALRSILPYMEQG | |
| | EVYSSACERAGYTFTGPKKKQKTMLLPNIPPIANPVVMRALTQ | |
| | ARKVVNAIIKKYGSPVSIHIELARDLSQTFDERRKTKKEQDENR | |
| | KKNETAIRQLMEYGLTLNPTGHDIVKFKLWSEQNGRCAYSLQP | |
| | IEIERLLEPGYVEVDHVIPYSRSLDDSYTNKVLVLTRENREKGN | |
| | RIPAEYLGVGTERWQQFETFVLINKQFSKKKRDRLLRLHYDEN | |
| | EETEFKNRNLNDTRYISRFFANFIREHLKFAESDDKQKVYTVN | |
| | GRVTAHLRSRWEFNKNREESDLHHAVDAVIVACTTPSDIAKVT | |
| | AFYQRREQNKELAKKTEPHFPQPWPHFADELRARLSKHPKESI | |
| | KALNLGNYDDQKLESLQPVFVSRMPKRSVTGAAHQETLRRYV | |
| | GIDERSGKIQTVVKTKLSEIKLDASGHFPMYGKESDPRTYEAIR | |
| | QRLLEHNNDPKKAFQEPLYKPKKNGEPGPVIRTVKIIDTKNQVI | |
| | PLNDGKTVAYNSNIVRVDVFEKDGKYYCVPVYTMDIMKGILP | |
| | NKAIEPNKPYSEWKEMTEDYTFRFSLYPNDLIRIELPREKTVKT | |
| | AAGEEINVKDVFVYYKTIDSANGGLELISHDHRFSLRGVGSRT | |
| | LKRFEKYQVDVLGNIYKVRGEKRVGLASSAHSKPGKTIRPLQS | |
| | TRD | |
| LbCas12a | MSKLEKFTNCYSLSKTLRFKAIPVGKTQENIDNKRLLVEDEKR | SEQ ID NO: |
| L. bacterium | AEDYKGVKKLLDRYYLSFINDVLHSIKLKNLNNYISLFRKKTR | 381 |
| 1228 AA | TEKENKELENLEINLRKEIAKAFKGNEGYKSLFKKDIIETILPEF | |
| 143.9 kDa | LDDKDEIALVNSFNGFTTAFTGFFDNRENMFSEEAKSTSIAFRCI | |
| | NENLTRYISNMDIFEKVDAIFDKHEVQEIKEKILNSDYDVEDFF | |
| | EGEFFNFVLTQEGIDVYNAIIGGFVTESGEKIKGLNEYINLYNQ | |
| | KTKQKLPKFKPLYKQVLSDRESLSFYGEGYTSDEEVLEVFRNT | |
| | LNKNSEIFSSIKKLEKLFKNFDEYSSAGIFVKNGPAISTISKDIFG | |
| | EWNVIRDKWNAEYDDIHLKKKAVVTEKYEDDRRKSFKKIGSF | |
| | SLEQLQEYADADLSVVEKLKEIIIQKVDEIYKVYGSSEKLFDAD | |
| | FVLEKSLKKNDAVVAIMKDLLDSVKSFENYIKAFFGEGKETNR | |
| | DESFYGDFVLAYDILLKVDHIYDAIRNYVTQKPYSKDKFKLYF | |
| | QNPQFMGGWDKDKETDYRATILRYGSKYYLAIMDKKYAKCL | |
| | QKIDKDDVNGNYEKINYKLLPGPNKMLPKVFFSKKWMAYYN | |
| | PSEDIQKIYKNGTFKKGDMFNLNDCHKLIDFFKDSISRYPKWS | |
| | NAYDFNFSETEKYKDIAGFYREVEEQGYKVSFESASKKEVDKL | |
| | VEEGKLYMFQIYNKDFSDKSHGTPNLHTMYFKLLFDENNHGQ | |
| | IRLSGGAELFMRRASLKKEELVVHPANSPIANKNPDNPKKTTTL | |
| | SYDVYKDKRFSEDQYELHIPIAINKCPKNIFKINTEVRVLLKHD | |
| | DNPYVIGIDRGERNLLYIVVVDGKGNIVEQYSLNEIINNENGIRI | |
| | KTDYHSLLDKKEKERFEARQNWTSIENIKELKAGYISQVVHKI | |
| | CELVEKYDAVIALEDLNSGFKNSRVKVEKQVYQKFEKMLIDKL | |
| | NYMVDKKSNPCATGGALKGYQITNKFESFKSMSTQNGFIFYIP | |
| | AWLTSKIDPSTGFVNLLKTKYTSIADSKKFISSFDRIMYVPEEDL | |
| | FEFALDYKNFSRTDADYIKKWKLYSYGNRIRIFRNPKKNNVFD | |
| | WEEVCLTSAYKELFNKYGINYQQGDIRALLCEQSDKAFYSSFM | |
| | ALMSLMLQMRNSITGRTDVDFLISPVKNSDGIFYDSRNYEAQE | |
| | NAILPKNADANGAYNIARKVLWAIGQFKKAEDEKLDKVKIAIS | |
| | NKEWLEYAQTSVKH | |
| BhCas12b | MATRSFILKIEPNEEVKKGLWKTHEVLNHGIAYYMNILKLIRQE | SEQ ID NO: |
| B. hisashii | AIYEHHEQDPKNPKKVSKAEIQAELWDFVLKMQKCNSFTHEV | 382 |
| 1108 AA | DKDEVFNILRELYEELVPSSVEKKGEANQLSNKFLYPLVDPNSQ | |
| 130.4 kDa | SGKGTASSGRKPRWYNLKIAGDPSWEEEKKKWEEDKKKDPL | |
| | AKILGKLAEYGLIPLFIPYTDSNEPIVKEIKWMEKSRNQSVRRL | |
| | DKDMFIQALERFLSWESWNLKVKEEYEKVEKEYKTLEERIKE | |
| | DIQALKALEQYEKERQEQLLRDTLNTNEYRLSKRGLRGWREII | |
| | QKWLKMDENEPSEKYLEVFKDYQRKHPREAGDYSVYEFLSK | |
| | KENHFIWRNHPEYPYLYATFCEIDKKKKDAKQQATFTLADPIN | |
| | HPLWVRFEERSGSNLNKYRILTEQLHTEKLKKKLTVQLDRLIYP | |
| | TESGGWEEKGKVDIVLLPSRQFYNQIFLDIEEKGKHAFTYKDE | |
| | SIKFPLKGTLGGARVQFDRDHLRRYPHKVESGNVGRIYFNMTV | |
| | NIEPTESPVSKSLKIHRDDFPKVVNFKPKELTEWIKDSKGKKLK | |
| | SGIESLEIGLRVMSIDLGQRQAAAASIFEVVDQKPDIEGKLFFPI | |
| | KGTELYAVHRASFNIKLPGETLVKSREVLRKAREDNLKLMNQK | |
| | LNFLRNVLHFQQFEDITEREKRVTKWISRQENSDVPLVYQDELI | |
| | QIRELMYKPYKDWVAFLKQLHKRLEVEIGKEVKHWRKSLSDG | |
| | RKGLYGISLKNIDEIDRTRKFLLRWSLRPTEPGEVRRLEPGQRF | |
| | AIDQLNHLNALKEDRLKKMANTIIMHALGYCYDVRKKKWQA | |
| | KNPACQIILFEDLSNYNPYEERSRFENSKLMKWSRREIPRQVAL | |
| | QGEIYGLQVGEVGAQFSSRFHAKTGSPGIRCSVVTKEKLQDNR | |
| | FFKNLQREGRLTLDKIAVLKEGDLYPDKGGEKFISLSKDRKCVT | |
| | THADINAAQNLQKRFWTRTHGFYKVYCKAYQVDGQTVYIPES | |
| | KDQKQKIIEEFGEGYFILKDGVYEWVNAGKLKIKKGSSKQSSS | |
| | ELVDSDILKDSFDLASELKGEKLMLYRDPSGNVFPSDKWMAA | |
| | GVFFGKLERILISKLTNQYSISTIEDDSSKQSM | |

[0341] Additional exemplary Cas9 equivalent protein sequences can include the following:

| Description | Sequence |
|---|---|
| AsCas12a | MTQFEGFTNLYQVSKTLRFELIPQGKTLKHIQEQGFIEEDKARNDHYKELKPII |
| (previously | DRIYKTYADQCLQLVQLDWENLSAAIDSYRKEKTEETRNALIEEQATYRNAIH |
| known as | DYFIGRTDNLTDAINKRHAEIYKGLFKAELFNGKVLKQLGTVTTTEHENALLR |
| Cpf1) | SFDKFTTYFSGFYENRKNVFSAEDISTAIPHRIVQDNFPKFKENCHIFTRLITAV |
| Acidaminococcus | PSLREHFENVKKAIGIFVSTSIEEVFSFPFYNQLLTQTQIDLYNQLLGGISREAG |
| sp. (strain | TEKIKGLNEVLNLAIQKNDETAHIIASLPHRFIPLFKQILSDRNTLSFILEEFKSD |
| BV3L6) | EEVIQSFCKYKTLLRNENVLETAEALFNELNSIDLTHIFISHKKLETISSALCDH |
| UniProtKB | WDTLRNALYERRISELTGKITKSAKEKVQRSLKHEDINLQEIISAAGKELSEAF |
| U2UMQ6 | KQKTSEILSHAHAALDQPLPTTLKKQEEKEILKSQLDSLLGLYHLLDWFAVDE |
| | SNEVDPEFSARLTGIKLEMEPSLSFYNKARNYATKKPYSVEKFKLNFQMPTLA |
| | SGWDVNKEKNNGAILFVKNGLYYLGIMPKQKGRYKALSFEPTEKTSEGFDK |
| | MYYDYFPDAAKMIPKCSTQLKAVTAHFQTHTTPILLSNNFIEPLEITKEIYDLN |
| | NPEKEPKKFQTAYAKKTGDQKGYREALCKWIDFTRDFLSKYTKTTSIDLSSLR |
| | PSSQYKDLGEYYAELNPLLYHISFQRIAEKEIMDAVETGKLYLFQIYNKDFAKG |
| | HHGKPNLHTLYWTGLFSPENLAKTSIKLNGQAELFYRPKSRMKRMAHRLGE |
| | KMLNKKLKDQKTPIPDTLYQELYDYVNHRLSHDLSDEARALLPNVITKEVSH |
| | EIIKDRRFTSDKFFFHVPITLNYQAANSPSKFNQRVNAYLKEHPETPIIGIDRGE |
| | RNLIYITVIDSTGKILEQRSLNTIQQFDYQKKLDNREKERVAARQAWSVVGTI |
| | KDLKQGYLSQVIHEIVDLMIHYQAVVVLENLNFGFKSKRTGIAEKAVYQQFE |
| | KMLIDKLNCLVLKDYPAEKVGGVLNPYQLTDQFTSFAKMGTQSGFLFYVPAP |
| | YTSKIDPLTGFVDPFVWKTIKNHESRKHFLEGFDFLHYDVKTGDFILHFKMNR |
| | NLSFQRGLPGFMPAWDIVFEKNETQFDAKGTPFIAGKRIVPVIENHRFTGRYR |
| | DLYPANELIALLEEKGIVFRDGSNILPKLLENDDSHAIDTMVALIRSVLQMRNS |
| | NAATGEDYINSPVRDLNGVCFDSRFQNPEWPMDADANGAYHIALKGQLLLN |
| | HLKESKDLKLQNGISNQDWLAYIQELRN (SEQ ID NO: 383) |
| AsCas12a | MTQFEGFTNLYQVSKTLRFELIPQGKTLKHIQEQGFIEEDKARNDHYKELKPII |
| nickase (e.g., | DRIYKTYADQCLQLVQLDWENLSAAIDSYRKEKTEETRNALIEEQATYRNAIH |
| R1226A) | DYFIGRTDNLTDAINKRHAEIYKGLFKAELFNGKVLKQLGTVTTTEHENALLR |
| | SFDKFTTYFSGFYENRKNVFSAEDISTAIPHRIVQDNFPKFKENCHIFTRLITAV |
| | PSLREHFENVKKAIGIFVSTSIEEVFSFPFYNQLLTQTQIDLYNQLLGGISREAG |
| | TEKIKGLNEVLNLAIQKNDETAHIIASLPHRFIPLFKQILSDRNTLSFILEEFKSD |
| | EEVIQSFCKYKTLLRNENVLETAEALFNELNSIDLTHIFISHKKLETISSALCDH |
| | WDTLRNALYERRISELTGKITKSAKEKVQRSLKHEDINLQEIISAAGKELSEAF |
| | KQKTSEILSHAHAALDQPLPTTLKKQEEKEILKSQLDSLLGLYHLLDWFAVDE |
| | SNEVDPEFSARLTGIKLEMEPSLSFYNKARNYATKKPYSVEKFKLNFQMPTLA |
| | SGWDVNKEKNNGAILFVKNGLYYLGIMPKQKGRYKALSFEPTEKTSEGFDK |
| | MYYDYFPDAAKMIPKCSTQLKAVTAHFQTHTTPILLSNNFIEPLEITKEIYDLN |
| | NPEKEPKKFQTAYAKKTGDQKGYREALCKWIDFTRDFLSKYTKTTSIDLSSLR |
| | PSSQYKDLGEYYAELNPLLYHISFQRIAEKEIMDAVETGKLYLFQIYNKDFAKG |
| | HHGKPNLHTLYWTGLFSPENLAKTSIKLNGQAELFYRPKSRMKRMAHRLGE |
| | KMLNKKLKDQKTPIPDTLYQELYDYVNHRLSHDLSDEARALLPNVITKEVSH |
| | EIIKDRRFTSDKFFFHVPITLNYQAANSPSKFNQRVNAYLKEHPETPIIGIDRGE |
| | RNLIYITVIDSTGKILEQRSLNTIQQFDYQKKLDNREKERVAARQAWSVVGTI |
| | KDLKQGYLSQVIHEIVDLMIHYQAVVVLENLNFGFKSKRTGIAEKAVYQQFE |
| | KMLIDKLNCLVLKDYPAEKVGGVLNPYQLTDQFTSFAKMGTQSGFLFYVPAP |
| | YTSKIDPLTGFVDPFVWKTIKNHESRKHFLEGFDFLHYDVKTGDFILHFKMNR |
| | NLSFQRGLPGFMPAWDIVFEKNETQFDAKGTPFIAGKRIVPVIENHRFTGRYR |
| | DLYPANELIALLEEKGIVFRDGSNILPKLLENDDSHAIDTMVALIRSVLQMANS |
| | NAATGEDYINSPVRDLNGVCFDSRFQNPEWPMDADANGAYHIALKGQLLLN |
| | HLKESKDLKLQNGISNQDWLAYIQELRN (SEQ ID NO: 384) |
| LbCas12a | MNYKTGLEDFIGKESLSKTLRNALIPTESTKIHMEEMGVIRDDELRAEKQQEL |
| (previously | KEIMDDYYRTFIEEKLGQIQGIQWNSLFQKMEETMEDISVRKDLDKIQNEKR |
| known as | KEICCYFTSDKRFKDLFNAKLITDILPNFIKDNKEYTEEEKAEKEQTRVLFQRF |
| Cpf1) | ATAFTNYFNQRRNNFSEDNISTAISFRIVNENSEIHLQNMRAFQRIEQQYPEEV |
| Lachnospiraceae | CGMEEEYKDMLQEWQMKHIYSVDFYDRELTQPGIEYYNGICGKINEHMNQF |
| bacterium | CQKNRINKNDFRMKKLHKQILCKKSSYYEIPFRFESDQEVYDALNEFIKTMK |
| GAM79 | KKEIIRRCVHLGQECDDYDLGKIYISSNKYEQISNALYGSWDTIRKCIKEEYM |
| Ref Seq. | DALPGKGEKKEEKAEAAAKKEEYRSIADIDKIISLYGSEMDRTISAKKCITEIC |
| WP_119623382.1 | DMAGQISIDPLVCNSDIKLLQNKEKTTEIKTILDSFLHVYQWGQTFIVSDIIEKD |
| | SYFYSELEDVLEDFEGITTLYNHVRSYVTQKPYSTVKFKLHFGSPTLANGWSQ |
| | SKEYDNNAILLMRDQKFYLGIFNVRNKPDKQIIKGHEKEEKGDYKKMIYNLL |
| | PGPSKMLPKVFITSRSGQETYKPSKHILDGYNEKRHIKSSPKFDLGYCWDLID |
| | YYKECIHKHPDWKNYDFHFSDTKDYEDISGFYREVEMQGYQIKWTYISADEI |
| | QKLDEKGQIFLFQIYNKDFSVHSTGKDNLHTMYLKNLFSEENLKDIVLKLNG |
| | EAELFFRKASIKTPIVHKKGSVLVNRSYTQTVGNKEIRVSIPEEYYTEIYNYLN |
| | HIGKGKLSSEAQRYLDEGKIKSFTATKDIVKNYRYCCDHYFLHLPITINFKAKS |
| | DVAVNERTLAYIAKKEDIHIIGIDRGERNLLYISVVDVHGNIREQRSFNIVNGY |
| | DYQQKLKDREKSRDAARKNWEEIEKIKELKEGYLSMVIHYIAQLVVKYNAV |
| | VAMEDLNYGFKTGRFKVERQVYQKFETMLIEKLHYLVFKDREVCEEGGVLR |
| | GYQLTYIPESLKKVGKQCGFIFYVPAGYTSKIDPTTGFVNLFSFKNLTNRESRQ |
| | DFVGKFDEIRYDRDKKMFEFSFDYNNYIKKGTILASTKWKVYTNGTRLKRIV |
| | VNGKYTSQSMEVELTDAMEKMLQRAGIEYHDGKDLKGQIVEKGIEAEIIDIFR |
| | LTVQMRNSRSESEDREYDRLISPVLNDKGEFFDTATADKTLPQDADANGAYCI |
| | ALKGLYEVKQIKENWKENEQFPRNKLVQDNKTWFDFMQKKRYL (SEQ ID |
| | NO: 385) |
| PcCas12a- | MAKNFEDFKRLYSLSKTLRFEAKPIGATLDNIVKSGLLDEDEHRAASYVKVK |
| previously | KLIDEYHKVFIDRVLDDGCLPLENKGNNNSLAEYYESYVSRAQDEDAKKKF |
| known at Cpf1 | KEIQQNLRSVIAKKLTEDKAYANLFGNKLIESYKDKEDKKKIIDSDLIQFINTAE |
| Prevotella | STQLDSMSQDEAKELVKEFWGFVTYFYGFFDNRKNMYTAEEKSTGIAYRLV |
| copri | NENLPKFIDNIEAFNRAITRPEIQENMGVLYSDFSEYLNVESIQEMFQLDYYN |
| Ref Seq. | MLLTQKQIDVYNAIIGGKTDDEHDVKIKGINEYINLYNQQHKDDKLPKLKAL |
| WP_119227726.1 | FKQILSDRNAISWLPEEFNSDQEVLNAIKDCYERLAENVLGDKVLKSLLGSLA |
| | DYSLDGIFIRNDLQLTDISQKMFGNWGVIQNAIMQNIKRVAPARKHKESEEDY |
| | EKRIAGIFKKADSFSISYINDCLNEADPNNAYFVENYFATFGAVNTPTMQRENL |
| | FALVQNAYTEVAALLHSDYPTVKHLAQDKANVSKIKALLDAIKSLQHFVKPL |
| | LGKGDESDKDERFYGELASLWAELDTVTPLYNMIRNYMTRKPYSQKKIKLNF |
| | ENPQLLGGWDANKEKDYATIILRRNGLYYLAIMDKDSRKLLGKAMPSDGEC |
| | YEKMVYKFFKDVTTMIPKCSTQLKDVQAYFKVNTDDYVLNSKAFNKPLTIT |
| | KEVFDLNNVLYGKYKKFQKGYLTATGDNVGYTHAVNVWIKFCMDFLNSYDS |
| | TCIYDFSSLKPESYLSLDAFYQDANLLLYKLSFARASVSYINQLVEEGKMYLF |
| | QIYNKDFSEYSKGTPNMHTLYWKALFDERNLADVVYKLNGQAEMFYRKKSI |
| | ENTHPTHPANHPILNKNKDNKKKESLFDYDLIKDRRYTVDKFMFHVPITMNF |
| | KSVGSENINQDVKAYLRHADDMHIIGIDRGERHLLYLVVIDLQGNIKEQYSLN |
| | EIVNEYNGNTYHTNYHDLLDVREEERLKARQSWQTIENIKELKEGYLSQVIH |
| | KITQLMVRYHAIVVLEDLSKGFMRSRQKVEKQVYQKFEKMLIDKLNYLVDK |
| | KTDVSTPGGLLNAYQLTCKSDSSQKLGKQSGFLFYIPAWNTSKIDPVTGFVNL |
| | LDTHSLNSKEKIKAFFSKFDAIRYNKDKKWFEFNLDYDKFGKKAEDTRTKWT |
| | LCTRGMRIDTFRNKEKNSQWDNQEVDLTTEMKSLLEHYYIDIHGNLKDAISA |
| | QTDKAFFTGLLHILKLTLQMRNSITGTETDYLVSPVADENGIFYDSRSCGNQLP |
| | ENADANGAYNIARKGLMLIEQIKNAEDLNNVKFDISNKAWLNFAQQKPYKN |
| | G (SEQ ID NO: 386) |
| ErCas12a- | MFSAKLISDILPEFVIHNNNYSASEKEEKTQVIKLESRFATSFKDYFKNRANCF |
| previously | SANDISSSSCHRIVNDNAEIFFSNALVYRRIVKNLSNDDINKISGDMKDSLKEM |
| known at Cpf1 | SLEEIYSYEKYGEFITQEGISFYNDICGKVNLFMNLYCQKNKENKNLYKLRKL |
| Eubacterium | HKQILCIADTSYEVPYKFESDEEVYQSVNGFLDNISSKHIVERLRKIGENYNG |
| rectale | YNLDKIYIVSKFYESVSQKTYRDWETINTALEIHYNNILPGNGKSKADKVKK |
| Ref Seq. | AVKNDLQKSITEINELVSNYKLCPDDNIKAETYIHEISHILNNFEAQELKYNPEI |
| WP_119223642.1 | HLVESELKASELKNVLDVIMNAFHWCSVFMTEELVDKDNNFYAELEEIYDEI |
| | YPVISLYNLVRNYVTQKPYSTKKIKLNFGIPTLADGWSKSKEYSNNAIILMRD |
| | NLYYLGIFNAKNKPDKKIIEGNTSENKGDYKKMIYNLLPGPNKMIPKVFLSSK |
| | TGVETYKPSAYILEGYKQNKHLKSSKDFDITFCHDLIDYFKNCIAIHPEWKNF |
| | GFDFSDTSTYEDISGFYREVELQGYKIDWTYISEKDIDLLQEKGQLYLFQIYNK |
| | DFSKKSSGNDNLHTMYLKNLFSEENLKDIVLKLNGEAEIFFRKSSIKNPIIHKK |
| | GSILVNRTYEAEEKDQFGNIQIVRKTIPENIYQELYKYFNDKSDKELSDEAAKL |
| | KNVVGHHEAATNIVKDYRYTYDKYFLHMPITINFKANKTSFINDRILQYIAKE |
| | KDLHVIGIDRGERNLIYVSVIDTCGNIVEQKSFNIVNGYDYQIKLKQQEGARQI |
| | ARKEWKEIGKIKEIKEGYLSLVIHEISKMVIKYNAIIAMEDLSYGFKKGRFKVE |
| | RQVYQKFETMLINKLNYLVFKDISITENGGLLKGYQLTYIPDKLKNVGHQCG |
| | CIFYVPAAYTSKIDPTTGFVNIFKFKDLTVDAKREFIKKFDSIRYDSDKNLFCFT |
| | FDYNNFITQNTVMSKSSWSVYTYGVRIKRRFVNGRFSNESDTIDITKDMEKTL |
| | EMTDINWRDGHDLRQDIIDYEIVQHIFEIFKLTVQMRNSLSELEDRDYDRLISP |
| | VLNENNIFYDSAKAGDALPKDADANGAYCIALKGLYEIKQITENWKEDGKFS |
| | RDKLKISNKDWFDFIQNKRYL (SEQ ID NO: 387) |
| CsCas12a- | MNYKTGLEDFIGKESLSKTLRNALIPTESTKIHMEEMGVIRDDELRAEKQQEL |
| previously | KEIMDDYYRAFIEEKLGQIQGIQWNSLFQKMEETMEDISVRKDLDKIQNEKR |
| known at Cpf1 | KEICCYFTSDKRFKDLFNAKLITDILPNFIKDNKEYTEEEKAEKEQTRVLFQRF |
| Clostridium sp. | ATAFTNYFNQRRNNFSEDNISTAISFRIVNENSEIHLQNMRAFQRIEQQYPEEV |
| AF34-10BH | CGMEEEYKDMLQEWQMKHIYLVDFYDRVLTQPGIEYYNGICGKINEHMNQF |
| Ref Seq. | CQKNRINKNDFRMKKLHKQILCKKSSYYEIPFRFESDQEVYDALNEFIKTMK |
| WP_118538418.1 | EKEIICRCVHLGQKCDDYDLGKIYISSNKYEQISNALYGSWDTIRKCIKEEYM |
| | DALPGKGEKKEEKAEAAAKKEEYRSIADIDKIISLYGSEMDRTISAKKCITEIC |
| | DMAGQISTDPLVCNSDIKLLQNKEKTTEIKTILDSFLHVYQWGQTFIVSDIIEK |
| | DSYFYSELEDVLEDFEGITTLYNHVRSYVTQKPYSTVKFKLHFGSPTLANGWS |
| | QSKEYDNNAILLMRDQKFYLGIFNVRNKPDKQIIKGHEKEEKGDYKKMIYNL |
| | LPGPSKMLPKVFITSRSGQETYKPSKHILDGYNEKRHIKSSPKFDLGYCWDLI |
| | DYYKECIHKHPDWKNYDFHFSDTKDYEDISGFYREVEMQGYQIKWTYISAD |
| | EIQKLDEKGQIFLFQIYNKDFSVHSTGKDNLHTMYLKNLFSEENLKDIVLKLN |
| | GEAELFFRKASIKTPVVHKKGSVLVNRSYTQTVGDKEIRVSIPEEYYTEIYNYL |
| | NHIGRGKLSTEAQRYLEERKIKSFTATKDIVKNYRYCCDHYFLHLPITINFKAK |
| | SDIAVNERTLAYIAKKEDIHIIGIDRGERNLLYISVVDVHGNIREQRSFNIVNGY |
| | DYQQKLKDREKSRDAARKNWEEIEKIKELKEGYLSMVIHYIAQLVVKYNAV |
| | VAMEDLNYGFKTGRFKVERQVYQKFETMLIEKLHYLVFKDREVCEEGGVLR |
| | GYQLTYIPESLKKVGKQCGFIFYVPAGYTSKIDPTTGFVNLFSFKNLTNRESRQ |
| | DFVGKFDEIRYDRDKKMFEFSFDYNNYIKKGTMLASTKWKVYTNGTRLKRI |
| | VVNGKYTSQSMEVELTDAMEKMLQRAGIEYHDGKDLKGQIVEKGIEAEIIDI |
| | FRLTVQMRNSRSESEDREYDRLISPVLNDKGEFFDTATADKTLPQDADANGA |
| | YCIALKGLYEVKQIKENWKENEQFPRNKLVQDNKTWFDFMQKKRYL (SEQ |
| | ID NO: 388) |
| BhCas 12b | MATRSFILKIEPNEEVKKGLWKTHEVLNHGIAYYMNILKLIRQEAIYEHHEQD |
| Bacillus | PKNPKKVSKAEIQAELWDFVLKMQKCNSFTHEVDKDEVFNILRELYEELVPSS |
| hisashii | VEKKGEANQLSNKFLYPLVDPNSQSGKGTASSGRKPRWYNLKIAGDPSWEEE |
| Ref Seq. | KKKWEEDKKKDPLAKILGKLAEYGLIPLFIPYTDSNEPIVKEIKWMEKSRNQS |
| WP_095142515.1 | VRRLDKDMFIQALERFLSWESWNLKVKEEYEKVEKEYKTLEERIKEDIQALK |
| | ALEQYEKERQEQLLRDTLNTNEYRLSKRGLRGWREIIQKWLKMDENEPSEK |
| | YLEVFKDYQRKHPREAGDYSVYEFLSKKENHFIWRNHPEYPYLYATFCEIDK |
| | KKKDAKQQATFTLADPINHPLWVRFEERSGSNLNKYRILTEQLHTEKLKKKLT |
| | VQLDRLIYPTESGGWEEKGKVDIVLLPSRQFYNQIFLDIEEKGKHAFTYKDESI |
| | KFPLKGTLGGARVQFDRDHLRRYPHKVESGNVGRIYFNMTVNIEPTESPVSK |
| | SLKIHRDDFPKVVNFKPKELTEWIKDSKGKKLKSGIESLEIGLRVMSIDLGQRQ |
| | AAAASIFEVVDQKPDIEGKLFFPIKGTELYAVHRASFNIKLPGETLVKSREVLR |
| | KAREDNLKLMNQKLNFLRNVLHFQQFEDITEREKRVTKWISRQENSDVPLVY |
| | QDELIQIRELMYKPYKDWVAFLKQLHKRLEVEIGKEVKHWRKSLSDGRKGL |
| | YGISLKNIDEIDRTRKFLLRWSLRPTEPGEVRRLEPGQRFAIDQLNHLNALKED |
| | RLKKMANTIIMHALGYCYDVRKKKWQAKNPACQIILFEDLSNYNPYEERSRF |
| | ENSKLMKWSRREIPRQVALQGEIYGLQVGEVGAQFSSRFHAKTGSPGIRCSV |
| | VTKEKLQDNRFFKNLQREGRLTLDKIAVLKEGDLYPDKGGEKFISLSKDRKC |
| | VTTHADINAAQNLQKRFWTRTHGFYKVYCKAYQVDGQTVYIPESKDQKQKI |
| | IEEFGEGYFILKDGVYEWVNAGKLKIKKGSSKQSSSELVDSDILKDSFDLASEL |
| | KGEKLMLYRDPSGNVFPSDKWMAAGVFFGKLERILISKLTNQYSISTIEDDSS |
| | KQSM (SEQ ID NO: 389) |
| ThCas12b | MSEKTTQRAYTLRLNRASGECAVCQNNSCDCWHDALWATHKAVNRGAKAF |
| Thermomonas | GDWLLTLRGGLCHTLVEMEVPAKGNNPPQRPTDQERRDRRVLLALSWLSVE |
| hydrothermalis | DEHGAPKEFIVATGRDSADDRAKKVEEKLREILEKRDFQEHEIDAWLQDCGPS |
| Ref Seq. | LKAHIREDAVWVNRRALFDAAVERIKTLTWEEAWDFLEPFFGTQYFAGIGDG |
| WP_072754838 | KDKDDAEGPARQGEKAKDLVQKAGQWLSARFGIGTGADFMSMAEAYEKIA |
| | KWASQAQNGDNGKATIEKLACALRPSEPPTLDTVLKCISGPGHKSATREYLKT |
| | LDKKSTVTQEDLNQLRKLADEDARNCRKKVGKKGKKPWADEVLKDVENSC |
| | ELTYLQDNSPARHREFSVMLDHAARRVSMAHSWIKKAEQRRRQFESDAQKL |
| | KNLQERAPSAVEWLDRFCESRSMTTGANTGSGYRIRKRAIEGWSYVVQAWA |
| | EASCDTEDKRIAAARKVQADPEIEKFGDIQLFEALAADEAICVWRDQEGTQN |
| | PSILIDYVTGKTAEHNQKRFKVPAYRHPDELRHPVFCDFGNSRWSIQFAIHKEI |
| | RDRDKGAKQDTRQLQNRHGLKMRLWNGRSMTDVNLHWSSKRLTADLALD |
| | QNPNPNPTEVTRADRLGRAASSAFDHVKIKNVFNEKEWNGRLQAPRAELDRI |
| | AKLEEQGKTEQAEKLRKRLRWYVSFSPCLSPSGPFIVYAGQHNIQPKRSGQYA |
| | PHAQANKGRARLAQLILSRLPDLRILSVDLGHRFAAACAVWETLSSDAFRREI |
| | QGLNVLAGGSGEGDLFLHVEMTGDDGKRRTVVYRRIGPDQLLDNTPHPAPW |
| | ARLDRQFLIKLQGEDEGVREASNEELWTVHKLEVEVGRTVPLIDRMVRSGFG |
| | KTEKQKERLKKLRELGWISAMPNEPSAETDEKEGEIRSISRSVDELMSSALGT |
| | LRLALKRHGNRARIAFAMTADYKPMPGGQKYYFHEAKEASKNDDETKRRD |
| | NQIEFLQDALSLWHDLFSSPDWEDNEAKKLWQNHIATLPNYQTPEEISAELKR |
| | VERNKKRKENRDKLRTAAKALAENDQLRQHLHDTWKERWESDDQQWKER |
| | LRSLKDWIFPRGKAEDNPSIRHVGGLSITRINTISGLYQILKAFKMRPEPDDLR |
| | KNIPQKGDDELENFNRRLLEARDRLREQRVKQLASRIIEAALGVGRIKIPKNG |
| | KLPKRPRTTVDTPCHAVVIESLKTYRPDDLRTRRENRQLMQWSSAKVRKYLK |
| | EGCELYGLHFLEVPANYTSRQCSRTGLPGIRCDDVPTGDFLKAPWWRRAINT |
| | AREKNGGDAKDRFLVDLYDHLNNLQSKGEALPATVRVPRQGGNLFIAGAQL |
| | DDTNKERRAIQADLNAAANIGLRALLDPDWRGRWWYVPCKDGTSEPALDRI |
| | EGSTAFNDVRSLPTGDNSSRRAPREIENLWRDPSGDSLESGTWSPTRAYWDT |
| | VQSRVIELLRRHAGLPTS (SEQ ID NO: 390) |
| LsCas12b | MSIRSFKLKLKTKSGVNAEQLRRGLWRTHQLINDGIAYYMNWLVLLRQEDLF |
| Laceyella | IRNKETNEIEKRSKEEIQAVLLERVHKQQQRNQWSGEVDEQTLLQALRQLYEE |
| sacchari | IVPSVIGKSGNASLKARFFLGPLVDPNNKTTKDVSKSGPTPKWKKMKDAGDP |
| WP_132221894.1 | NWVQEYEKYMAERQTLVRLEEMGLIPLFPMYTDEVGDIHWLPQASGYTRTW |
| | DRDMFQQAIERLLSWESWNRRVRERRAQFEKKTHDFASRFSESDVQWMNKL |
| | REYEAQQEKSLEENAFAPNEPYALTKKALRGWERVYHSWMRLDSAASEEAY |
| | WQEVATCQTAMRGEFGDPAIYQFLAQKENHDIWRGYPERVIDFAELNHLQRE |
| | LRRAKEDATFTLPDSVDHPLWVRYEAPGGTNIHGYDLVQDTKRNLTLILDKFI |
| | LPDENGSWHEVKKVPFSLAKSKQFHRQVWLQEEQKQKKREVVFYDYSTNLP |
| | HLGTLAGAKLQWDRNFLNKRTQQQIEETGEIGKVFFNISVDVRPAVEVKNGR |
| | LQNGLGKALTVLTHPDGTKIVTGWKAEQLEKWVGESGRVSSLGLDSLSEGLR |
| | VMSIDLGQRTSATVSVFEITKEAPDNPYKFFYQLEGTEMFAVHQRSFLLALPG |
| | ENPPQKIKQMREIRWKERNRIKQQVDQLSAILRLHKKVNEDERIQAIDKLLQK |
| | VASWQLNEEIATAWNQALSQLYSKAKENDLQWNQAIKNAHHQLEPVVGKQI |
| | SLWRKDLSTGRQGIAGLSLWSIEELEATKKLLTRWSKRSREPGVVKRIERFETF |
| | AKQIQHHINQVKENRLKQLANLIVMTALGYKYDQEQKKWIEVYPACQVVLF |
| | ENLRSYRFSFERSRRENKKLMEWSHRSIPKLVQMQGELFGLQVADVYAAYSS |
| | RYHGRTGAPGIRCHALTEADLRNETNIIHELIEAGFIKEEHRPYLQQGDLVPWS |
| | GGELFATLQKPYDNPRILTLHADINAAQNIQKRFWHPSMWFRVNCESVMEGE |
| | IVTYVPKNKTVHKKQGKTFRFVKVEGSDVYEWAKWSKNRNKNTFSSITERK |
| | PPSSMILFRDPSGTFFKEQEWVEQKTFWGKVQSMIQAYMKKTIVQRMEE |
| | (SEQ ID NO: 391) |
| DtCas12b | MVLGRKDDTAELRRALWTTHEHVNLAVAEVERVLLRCRGRSYWTLDRRGDP |
| Dsulfonatronum | VHVPESQVAEDALAMAREAQRRNGWPVVGEDEEILLALRYLYEQIVPSCLLD |
| thiodismutans | DLGKPLKGDAQKIGTNYAGPLFDSDTCRRDEGKDVACCGPFHEVAGKYLGA |
| WP_031386437 | LPEWATPISKQEFDGKDASHLRFKATGGDDAFFRVSIEKANAWYEDPANQDA |
| | LKNKAYNKDDWKKEKDKGISSWAVKYIQKQLQLGQDPRTEVRRKLWLELGL |
| | LPLFIPVFDKTMVGNLWNRLAVRLALAHLLSWESWNHRAVQDQALARAKR |
| | DELAALFLGMEDGFAGLREYELRRNESIKQHAFEPVDRPYVVSGRALRSWTR |
| | VREEWLRHGDTQESRKNICNRLQDRLRGKFGDPDVFHWLAEDGQEALWKE |
| | RDCVTSFSLLNDADGLLEKRKGYALMTFADARLHPRWAMYEAPGGSNLRTY |
| | QIRKTENGLWADVVLLSPRNESAAVEEKTFNVRLAPSGQLSNVSFDQIQKGSK |
| | MVGRCRYQSANQQFEGLLGGAEILFDRKRIANEQHGATDLASKPGHVWFKL |
| | TLDVRPQAPQGWLDGKGRPALPPEAKHFKTALSNKSKFADQVRPGLRVLSVD |
| | LGVRSFAACSVFELVRGGPDQGTYFPAADGRTVDDPEKLWAKHERSFKITLPG |
| | ENPSRKEEIARRAAMEELRSLNGDIRRLKAILRLSVLQEDDPRTEHLRLFMEAI |
| | VDDPAKSALNAELFKGFGDDRFRSTPDLWKQHCHFFHDKAEKVVAERFSRW |
| | RTETRPKSSSWQDWRERRGYAGGKSYWAVTYLEAVRGLILRWNMRGRTYGE |
| | VNRQDKKQFGTVASALLHHINQLKEDRIKTGADMIIQAARGFVPRKNGAGW |
| | VQVHEPCRLILFEDLARYRFRTDRSRRENSRLMRWSHREIVNEVGMQGELYG |
| | LHVDTTEAGFSSRYLASSGAPGVRCRHLVEEDFHDGLPGMHLVGELDWLLP |
| | KDKDRTANEARRLLGGMVRPGMLVPWDGGELFATLNAASQLHVIHADINAA |
| | QNLQRRFWGRCGEAIRIVCNQLSVDGSTRYEMAKAPKARLLGALQQLKNGD |
| | APFHLTSIPNSQKPENSYVMTPTNAGKKYRAGPGEKSSGEEDELALDIVEQAE |
| | ELAQGRKTFFRDPSGVFFAPDRWLPSEIYWSRIRRRIWQVTLERNSSGRQERA |
| | EMDEMPY (SEQ ID NO: 392) |

[0342] The base editors described herein may also comprise Cas12a/Cpf1 (dCpf1) variants that may be used as a guide nucleotide sequence-programmable DNA-binding protein domain. The Cas12a/Cpf1 protein has a RuvC-like endonuclease domain that is similar to the RuvC domain of Cas9 but does not have a HNH endonuclease domain, and the N-terminal of Cpf1 does not have the alpha-helical recognition lobe of Cas9. It was shown in Zetsche et al., Cell, 163, 759-771, 2015 (which is incorporated herein by reference) that, the RuvC-like domain of Cpf1 is responsible for cleaving both DNA strands and inactivation of the RuvC-like domain inactivates Cpf1 nuclease activity.

[0343] Recently, a more specific SpCas9 variant termed Sniper-Cas9 was generated, in Lee, J. K. et al., Nat. Commun. 9, 3048 (2018), which is incorporated by reference herein. Sniper-Cas9 was shown to significantly lower off-target editing than with SpCas9 and wild-type-like levels of on-target activities with truncated sgRNAs or sgRNAs with 5′-G-extended mismatched spacers. The Sniper-SpCas9 contains D10A, F539S, M763I, and K890N substitutions in the amino acid sequence of SEQ ID NO: 6 (and is thus also a nickase, and is thus referred to herein also as “Sniper-nCas9”). Accordingly, in some embodiments, the napDNAbp domain of any of the disclosed CGBEs is a Sniper-nCas9, such as a Sniper-SpCas9n (SEQ ID NO: 733).

[0344] Recently, Cas9 variants SpG and SpRY that were generated from the SpCas9 sequence that can target almost all PAMs, exhibiting robust activities on a wide range of sites with NRN PAMs in human cells and lower but substantial activity on those with NYN PAMs, in Walton et al., Science. 2020; 368(6488): 290-296, which is incorporated by reference herein. The SpG Cas9 variant contains D1135L, S1136W, G1218K, E1219Q, R1335Q, and T1337R substitutions in the amino acid sequence of SEQ ID NO: 6. The SpRY Cas9 variant contains L1111R, D1135L, S1136W, G1218K, E1219Q, N1317R, A1322R, R1333P, R1335Q, and T1337R substitutions in the amino acid sequence of SEQ ID NO: 6. Accordingly, in some embodiments, the napDNAbp domain of any of the disclosed CGBEs is an SpG or an SpRY Cas9 variant, or a variant thereof.

[0345] The disclosure also provides fragments of napDNAbps, such as truncations of any of the napDNAbps provided herein. In some embodiments, the napDNAbp is an N-terminal truncation, where one or more amino acids are absent from the N-terminus of the napDNAbp. In some embodiments, the napDNAbp is absent 1, 2, 3, 4, 5, 6, 7, 8, 9, 10, 11, 12, 13, 14, 15, 16, 17, 18, 19, 20, 21, 22, 21, 24, 25, 26, 27, 28, 29, 30, 31, 32, 33, 34, 35, 36, 37, 38, 39, 40, 41, 42, 43, 44, 45, 46, 47, 48, 49, or 50 amino acids from the N-terminus of the napDNAbp. For example, the N-terminal truncation of the napDNAbp may be an N-terminal truncation of any napDNAbp provided herein, such as any one of the napDNAbps provided in any one of SEQ ID NOs: 4-40, 726-736. In some embodiments, the napDNAbp is a C-terminal truncation, where one or more amino acids are absent from the C-terminus of the napDNAbp. In some embodiments, the napDNAbp is absent 1, 2, 3, 4, 5, 6, 7, 8, 9, 10, 11, 12, 13, 14, 15, 16, 17, 18, 19, 20, 21, 22, 21, 24, 25, 26, 27, 28, 29, 30, 31, 32, 33, 34, 35, 36, 37, 38, 39, 40, 41, 42, 43, 44, 45, 46, 47, 48, 49, or 50 amino acids from the C-terminus of the napDNAbp. For example, the C-terminal truncation of the napDNAbp may be a C-terminal truncation of any napDNAbp provided herein, such as any one of the NAPs provided in any one of SEQ ID NOs: 4-40, 726-736.

[0346] In some embodiments, any of the napDNAbps provided herein have 1, 2, 3, 4, 5, 6, 7, 8, 9, 10, 11, 12, 13, 14, 15, 16, 17, 18, 19, 20, 21, 22, 21, 24, 25, 26, 27, 28, 29, 30, 31, 32, 33, 34, 35, 36, 37, 38, 39, 40, 41, 42, 43, 44, 45, 46, 47, 48, 49, 50, or more amino acid changes compared to any napDNAbp provided herein, such as any one of the napDNAbps provided in SEQ ID NOs: 4-40, 726-736.

### Uracil Binding Proteins (UBP)

[0347] The disclosed CGBEs contain at least one uracil binding protein (UBP) domain(s). The disclosed CGBEs may comprise two or more UBP domains. In some embodiments, the disclosed CGBEs comprise two UBP domains, such as two UdgX protein domains. In particular embodiments, the disclosed CGBEs comprise one or two UBP domains each comprising the amino acid sequence of SEQ ID NO: 49. In some embodiments, the disclosed CGBEs comprise one or two UBP domains each comprising a variant of the UdgX protein.

[0348] A uracil binding protein, or UBP, refers to a protein that is capable of binding to uracil. In some embodiments, the uracil binding protein is a uracil modifying enzyme. In some embodiments, the uracil binding protein is a uracil base excision enzyme. In some embodiments, the uracil binding protein is a uracil DNA glycosylase (UDG). In some embodiments, a uracil binding protein binds uracil with an affinity that is at least 1%, 2%, 3%, 5%, 10%, 15%, 20%, 30%, 40%, 50%, 60%, 70%, 80%, 90%, or at least 95% of the affinity that a wild type UDG (e.g., a human UDG) binds to uracil. In some embodiments, the uracil binding protein may have 1, 2, 3, 4, 5, 6, 7, 8, 9, 10, 11, 12, 13, 14, 15, 16, 17, 18, 19, 20, 21, 22, 21, 24, 25, 26, 27, 28, 29, 30, 31, 32, 33, 34, 35, 36, 37, 38, 39, 40, 41, 42, 43, 44, 45, 46, 47, 48, 49, 50, or more amino acid changes compared to wild type uracil binding protein such as a wild type UDG (e.g., a human UDG) binds to uracil.

[0349] In some embodiments, the UBP is a uracil modifying enzyme. In some embodiments, the UBP is a uracil base excision enzyme. In some embodiments, the UBP is a uracil DNA glycosylase. In some embodiments, the UBP is any of the uracil binding proteins provided herein. For example, the UBP may be a UDG, a UdgX, a UdgX*, a UdgX_On, or a SMUG1. In some embodiments, the UBP comprises an amino acid sequence that is at least 75%, 80%, 85%, 90%, 95%, 96%, 97%, 98%, 99%, or 99.5% identical to a uracil binding protein, a uracil base excision enzyme or a uracil DNA glycosylase (UDG) enzyme. In some embodiments, the UBP comprises an amino acid sequence that is at least 75%, 80%, 85%, 90%, 95%, 96%, 97%, 98%, 99%, or 99.5% identical to any of the uracil binding proteins provided herein, for example, any of the UBP and UBP variants provided below. In some embodiments, the UBP comprises an amino acid sequence that is at least 75%, 80%, 85%, 90%, 95%, 96%, 97%, 98%, 99%, or 99.5% identical to any one of SEQ ID NOs: 48-53. In some embodiments, the UBP comprises the amino acid sequence of any one of SEQ ID NOs: 48-53. In some embodiments, the uracil binding protein has 1, 2, 3, 4, 5, 6, 7, 8, 9, 10, 11, 12, 13, 14, 15, 16, 17, 18, 19, 20, 21, 22, 21, 24, 25, 26, 27, 28, 29, 30, 31, 32, 33, 34, 35, 36, 37, 38, 39, 40, 41, 42, 43, 44, 45, 46, 47, 48, 49, 50, or more amino acid changes compared to any UBP provided herein, such as any one of SEQ ID NOs: 48-53.

[0350] The disclosed CGBEs may comprise one or two (or more) UBP domains each comprising an amino acid sequence that is at least 75%, 80%, 85%, 90%, 95%, 96%, 97%, 98%, 99%, or 99.5% identical to the sequence of SEQ ID NO: 49. In some embodiments, the disclosed CGBEs comprise one or two UBP domains each comprising the amino acid sequence of SEQ ID NO: 49.

[0351] The disclosure also provides fragments of UBPs, such as truncations of any of the UBPs provided herein. In some embodiments, the UBP is an N-terminal truncation, where one or more amino acids are absent from the N-terminus of the UBP. In some embodiments, the UBP is absent 1, 2, 3, 4, 5, 6, 7, 8, 9, 10, 11, 12, 13, 14, 15, 16, 17, 18, 19, 20, 21, 22, 21, 24, 25, 26, 27, 28, 29, 30, 31, 32, 33, 34, 35, 36, 37, 38, 39, 40, 41, 42, 43, 44, 45, 46, 47, 48, 49, or 50 amino acids from the N-terminus of the UBP. For example, the N-terminal truncation of the UBP may be an N-terminal truncation of any UBP provided herein, such as any one of the UBPs provided in any one of SEQ ID NOs: 48-53. In some embodiments, the UBP is a C-terminal truncation, where one or more amino acids are absent from the C-terminus of the UBP. In some embodiments, the UBP is absent 1, 2, 3, 4, 5, 6, 7, 8, 9, 10, 11, 12, 13, 14, 15, 16, 17, 18, 19, 20, 21, 22, 21, 24, 25, 26, 27, 28, 29, 30, 31, 32, 33, 34, 35, 36, 37, 38, 39, 40, 41, 42, 43, 44, 45, 46, 47, 48, 49, or 50 amino acids from the C-terminus of the UBP. For example, the C-terminal truncation of the UBP may be a C-terminal truncation of any UBP provided herein, such as any one of the UBPs provided in any one of SEQ ID NOs: 48-53.

[0352] It should be appreciated that other UBPs would be apparent to the skilled artisan and are within the scope of this disclosure. For example UBPs have been described previously in Sang et al., “A Unique Uracil-DNA binding protein of the uracil DNA glycosylase superfamily,” Nucleic Acids Research, Vol. 43, No. 17 2015; the entire contents of which are hereby incorporated by reference.

UDG
(SEQ ID NO: 48)
MIGQKTLYSFFSPSPARKRHAPSPEPAVQGTGVAGVPEESGDAAAIPAK
KAPAGQEEPGTPPSSPLSAEQLDRIQRNKAAALLRLAARNVPVGFGESW
KKHLSGEFGKPYFIKLMGFVAEERKHYTVYPPPHQVFTWTQMCDIKDVK
VVILGQDPYHGPNQAHGLCFSVQRPVPPPPSLENIYKELSTDIEDFVHP
GHGDLSGWAKQGVLLLNAVLTVRAHQANSHKERGWEQFTDAVVSWLNQN
SNGLVFLLWGSYAQKKGSAIDRKRHHVLQTAHPSPLSVYRGFFGCRHFS
KTNELLQKSGKKPIDWKEL
UdgX
(SEQ ID NO: 49)
MAGAQDFVPHTADLAELAAAAGECRGCGLYRDATQAVFGAGGRSARIMM
IGEQPGDKEDLAGLPFVGPAGRLLDRALEAADIDRDALYVTNAVKHFKF
TRAAGGKRRIHKTPSRTEVVACRPWLIAEMTSVEPDVVVLLGATAAKAL
LGNDFRVTQHRGEVLHVDDVPGDPALVATVHPSSLLRGPKEERESAFAG
LVDDLRVAADVRP
UdgX* (R107S)
(SEQ ID NO: 50)
MAGAQDFVPHTADLAELAAAAGECRGCGLYRDATQAVFGAGGRSARIMM
IGEQPGDKEDLAGLPFVGPAGRLLDRALEAADIDRDALYVTNAVKHFKF
TRAAGGKRSIHKTPSRTEVVACRPWLIAEMTSVEPDVVVLLGATAAKAL
LGNDFRVTQHRGEVLHVDDVPGDPALVATVHPSSLLRGPKEERESAFAG
LVDDLRVAADVRP
UdgX_On (H109S)
(SEQ ID NO: 51)
MAGAQDFVPHTADLAELAAAAGECRGCGLYRDATQAVFGAGGRSARIMM
IGEQPGDKEDLAGLPFVGPAGRLLDRALEAADIDRDALYVTNAVKHFKF
TRAAGGKRRISKTPSRTEVVACRPWLIAEMTSVEPDVVVLLGATAAKAL
LGNDFRVTQHRGEVLHVDDVPGDPALVATVHPSSLLRGPKEERESAFAG
LVDDLRVAADVRP
Rev7
(SEQ ID NO: 52)
MTTLTRQDLNFGQVVADVLCEFLEVAVHLILYVREVYPVGIFQKRKKYN
VPVQMSCHPELNQYIQDTLHCVKPLLEKNDVEKVVVVILDKEHRPVEKF
VFEITQPPLLSISSDSLLSHVEQLLRAFILKISVCDAVLDHNPPGCTFT
VLVHTREAATRNMEKIQVIKDFPWILADEQDVHMHDPRLIPLKTMTSDI
LKMQLYVEERAHKGS
Smug1
(SEQ ID NO: 53)
MPQAFLLGSIHEPAGALMEPQPCPGSLAESFLEEELRLNAELSQLQFSE
PVGIIYNPVEYAWEPHRNYVTRYCQGPKEVLFLGMNPGPFGMAQTGVPF
GEVSMVRDWLGIVGPVLTPPQEHPKRPVLGLECPQSEVSGARFWGFFRN
LCGQPEVFFHHCFVHNLCPLLFLAPSGRNLTPAELPAKQREQLLGICDA
ALCRQVQLLGVRLVVGVGRLAEQRARRALAGLMPEVQVEGLLHPSPRNP
QANKGWEAVAKERLNELGLLPLLLK

### DNA Repair Protein Domains

[0353] As used herein, a DNA repair protein refers to an enzyme or protein that is implicated in DNA repair. The DNA repair protein domains of this disclosure were identified following a CRISPR interference screen of mammalian genes implicated in DNA repair that further impact cytosine base editing efficiency and purity. It will be appreciated that DNA repair proteins other than those enumerated herein may be incorporated into the disclosed CGBEs. It will be appreciated that the DNA repair proteins for use in any of the disclosed CGBEs may be other protein components of DNA repair pathways and/or DNA repair enzymes or cofactors. The CRISPRi screen provided in Example 7 of this disclosure may provide additional hits for DNA repair proteins useful in any of the disclosed base editors and methods for editing. Other protein screens known to those in the art may provide additional hits for DNA repair proteins useful in any of the disclosed base editors and methods for editing.

[0354] In some embodiments, the DNA repair protein domain is a mammalian (such as a human) DNA repair protein. In some embodiments, the DNA repair protein domain is a human DNA polymerase, such as a human translesion polymerase. In some embodiments, the DNA repair protein is a human exonuclease. In some embodiments, the DNA repair protein is a human E3 ligase. The DNA repair protein may be selected from a DNA polymerase, an exonuclease, an RNA binding motif protein, an E3 ligase, and a translesion polymerase. In particular embodiments, the DNA repair protein is one of POLD2, RBMX, and EXO1.

[0355] In some embodiments, the DNA repair protein is a nucleic acid polymerase, such as a DNA polymerase (e.g., a translesion polymerase). In various embodiments, the DNA repair protein is selected from DNA polymerase D1 (POLD1), DNA polymerase D2 (POLD2), and DNA polymerase D3 (POLD3). In some embodiments, the DNA repair protein is an RNA binding motif protein, such as RNA binding motif protein, X-linked (RBMX). In some embodiments, the DNA repair protein is an exonuclease, such as exonuclease 1 (EX01). In some embodiments, the DNA repair protein is an E3 ligase, such as RAD18 or RFWD3.

[0356] In some embodiments, the DNA repair protein is a protein encoded by a gene selected from DDX1, EXO1, POLD1, POLD2, POLD3, RAD18, RBMX, REV1, RFWD3, TIMELESS, PCNA, POLH, POLK, UBE2I, and UBE2T.

[0357] In some embodiments, the DNA repair protein domain comprises an amino acid sequence that is at least 75%, 80%, 85%, 90%, 95%, 96%, 97%, 98%, 99%, or 99.5% identical to any one of SEQ ID NOs: 708-723. In some embodiments, the DNA repair protein domain comprises the amino acid sequence of any one of SEQ ID NOs: 708-723. In some embodiments, the DNA repair protein domain has 1, 2, 3, 4, 5, 6, 7, 8, 9, 10, 11, 12, 13, 14, 15, 16, 17, 18, 19, 20, 21, 22, 21, 24, 25, 26, 27, 28, 29, 30, 31, 32, 33, 34, 35, 36, 37, 38, 39, 40, 41, 42, 43, 44, 45, 46, 47, 48, 49, 50, or more amino acid changes compared to any NAP provided herein, such as any one of SEQ ID NOs: 708-723.

[0358] In particular embodiments, the DNA repair protein is one of POLD2, RBMX, and EXO1. In some embodiments, the DNA repair protein domain comprises an amino acid sequence that is at least 75%, 80%, 85%, 90%, 95%, 96%, 97%, 98%, 99%, or 99.5% identical to any one of SEQ ID NOs: 709, 712, and 717. In some embodiments, the DNA repair protein domain comprises the amino acid sequence of any one of SEQ ID NOs: 709, 712, and 717.

### Nucleic Acid Polymerases (NAP)

[0359] A nucleic acid polymerase, or NAP, refers to an enzyme that synthesizes nucleic acid molecules (e.g., DNA and RNA) from nucleotides (e.g., deoxyribonucleotides and ribonucleotides). In some embodiments, the NAP is a DNA polymerase. In some embodiments, the NAP is a translesion polymerase. Translesion polymerases play a role in mutagenesis, for example, by restarting replication forks or filling in gaps that remain in the genome due to the presence of DNA lesions. Exemplary translesion polymerases include, without limitation, Pol Beta, Pol Lambda, Pol Eta, Pol Mu, Pol Iota, Pol Kappa, Pol Alpha, Pol Delta, Pol Gamma, and Pol Nu.

[0360] In some embodiments, the NAP is a eukaryotic nucleic acid polymerase. In some embodiments, the NAP is a DNA polymerase. In some embodiments, the NAP has translesion polymerase activity. In some embodiments, the NAP is a translesion DNA polymerase. In some embodiments, the NAP is a Rev7, Rev1 complex, polymerase iota, polymerase kappa, or polymerase eta. In some embodiments, the NAP is a eukaryotic polymerase alpha, beta, gamma, delta, epsilon, gamma, eta, iota, kappa, lambda, mu, or nu. In some embodiments, the NAP comprises an amino acid sequence that is at least 75%, 80%, 85%, 90%, 95%, 96%, 97%, 98%, 99%, or 99.5% identical to a naturally occurring nucleic acid polymerase (e.g., a translesion DNA polymerase). In some embodiments, the NAP comprises an amino acid sequence that is at least 75%, 80%, 85%, 90%, 95%, 96%, 97%, 98%, 99%, or 99.5% identical to any of the nucleic acid polymerases provided herein, e.g., below. For example, the NAP may comprise an amino acid sequence that is at least 75%, 80%, 85%, 90%, 95%, 96%, 97%, 98%, 99%, or 99.5% identical to any one of SEQ ID NOs: 54-64. In some embodiments, the NAP comprises the amino acid sequence of any one of SEQ ID NOs: 54-64. It should be appreciated that other NAPs would be apparent to the skilled artisan and are within the scope of this disclosure. In some embodiments, the NAP comprises the amino acid sequence of any one of SEQ ID NOs: 54-64. In some embodiments, the nucleic acid polymerase has 1, 2, 3, 4, 5, 6, 7, 8, 9, 10, 11, 12, 13, 14, 15, 16, 17, 18, 19, 20, 21, 22, 21, 24, 25, 26, 27, 28, 29, 30, 31, 32, 33, 34, 35, 36, 37, 38, 39, 40, 41, 42, 43, 44, 45, 46, 47, 48, 49, 50, or more amino acid changes compared to any NAP provided herein, such as any one of SEQ ID NOs: 54-64.

[0361] It should be appreciated that other translesion polymerases that preferentially integrate non-C nucleobases (e.g., adenine, guanine, and thymine), may be used to generate alternative mutations (e.g., C to A mutations). Accordingly, in some embodiments, bases other than cytosine (e.g., adenine, guanine, or thymine) may replace a nucleobase opposite an abasic site.

[0362] The disclosure also provides fragments of NAPs, such as truncations of any of the NAPs provided herein. In some embodiments, the NAP is an N-terminal truncation, where one or more amino acids are absent from the N-terminus of the NAP. In some embodiments, the NAP is absent 1, 2, 3, 4, 5, 6, 7, 8, 9, 10, 11, 12, 13, 14, 15, 16, 17, 18, 19, 20, 21, 22, 21, 24, 25, 26, 27, 28, 29, 30, 31, 32, 33, 34, 35, 36, 37, 38, 39, 40, 41, 42, 43, 44, 45, 46, 47, 48, 49, or 50 amino acids from the N-terminus of the NAP. For example, the N-terminal truncation of the NAP may be an N-terminal truncation of any NAP provided herein, such as any one of the NAPs provided in any one of SEQ ID NOs: 54-64. In some embodiments, the NAP is a C-terminal truncation, where one or more amino acids are absent from the C-terminus of the NAP. In some embodiments, the NAP is absent 1, 2, 3, 4, 5, 6, 7, 8, 9, 10, 11, 12, 13, 14, 15, 16, 17, 18, 19, 20, 21, 22, 21, 24, 25, 26, 27, 28, 29, 30, 31, 32, 33, 34, 35, 36, 37, 38, 39, 40, 41, 42, 43, 44, 45, 46, 47, 48, 49, or 50 amino acids from the C-terminus of the NAP. For example, the C-terminal truncation of the NAP may be a C-terminal truncation of any NAP provided herein, such as any one of the NAPs provided in any one of SEQ ID NOs: 54-64.

Pol Beta
(SEQ ID NO: 54)
MSKRKAPQETLNGGITDMLTELANFEKNVSQAIHKYNAYRKAASVIAKYPHKIKSGAEAKK
LPGVGTKIAEKIDEFLATGKLRKLEKIRQDDTSSSINFLTRVSGIGPSAARKFVDEGIKTLEDLR
KNEDKLNHHQRIGLKYFGDFEKRIPREEMLQMQDIVLNEVKKVDSEYIATVCGSFRRGAESS
GDMDVLLTHPSFTSESTKQPKLLHQVVEQLQKVHFITDTLSKGETKFMGVCQLPSKNDEKEY
PHRRIDIRLIPKDQYYCGVLYFTGSDIFNKNMRAHALEKGFTINEYTIRPLGVTGVAGEPLPVD
SEKDIFDYIQWKYREPKDRSE
Pol Lambda
(SEQ ID NO: 55)
MDPRGILKAFPKRQKIHADASSKVLAKIPRREEGEEAEEWLSSLRAHVVRTGIGRARAELFEK
QIVQHGGQLCPAQGPGVTHIVVDEGMDYERALRLLRLPQLPPGAQLVKSAWLSLCLQERRL
VDVAGFSIFIPSRYLDHPQPSKAEQDASIPPGTHEALLQTALSPPPPPTRPVSPPQKAKEAPNTQ
AQPISDDEASDGEETQVSAADLEALISGHYPTSLEGDCEPSPAPAVLDKWVCAQPSSQKATN
HNLHITEKLEVLAKAYSVQGDKWRALGYAKAINALKSFHKPVTSYQEACSIPGIGKRMAEKII
EILESGHLRKLDHISESVPVLELFSNIWGAGTKTAQMWYQQGFRSLEDIRSQASLTTQQAIGL
KHYSDFLERMPREEATEIEQTVQKAAQAFNSGLLCVACGSYRRGKATCGDVDVLITHPDGRS
HRGIFSRLLDSLRQEGFLTDDLVSQEENGQQQKYLGVCRLPGPGRRHRRLDIIVVPYSEFACA
LLYFTGSAHFNRSMRALAKTKGMSLSEHALSTAVVRNTHGCKVGPGRVLPTPTEKDVFRLL
GLPYREPAERDW
Pol Eta
(SEQ ID NO: 56)
MATGQDRVVALVDMDCFFVQVEQRQNPHLRNKPCAVVQYKSWKGGGIIAVSYEARAFGVT
RSMWADDAKKLCPDLLLAQVRESRGKANLTKYREASVEVMEIMSRFAVIERASIDEAYVDL
TSAVQERLQKLQGQPISADLLPSTYIEGLPQGPTTAEETVQKEGMRKQGLFQWLDSLQIDNLT
SPDLQLTVGAVIVEEMRAAIERETGFQCSAGISHNKVLAKLACGLNKPNRQTLVSHGSVPQLF
SQMPIRKIRSLGGKLGASVIEILGIEYMGELTQFTESQLQSHFGEKNGSWLYAMCRGIEHDPV
KPRQLPKTIGCSKNFPGKTALATREQVQWWLLQLAQELEERLTKDRNDNDRVATQLVVSIR
VQGDKRLSSLRRCCALTRYDAHKMSHDAFTVIKNCNTSGIQTEWSPPLTMLFLCATKFSASA
PSSSTDITSFLSSDPSSLPKVPVTSSEAKTQGSGPAVTATKKATTSLESFFQKAAERQKVKEAS
LSSLTAPTQAPMSNSPSKPSLPFQTSQSTGTEPFFKQKSLLLKQKQLNNSSVSSPQQNPWSNCK
ALPNSLPTEYPGCVPVCEGVSKLEESSKATPAEMDLAHNSQSMHASSASKSVLEVTQKATPN
PSLLAAEDQVPCEKCGSLVPVWDMPEHMDYHFALELQKSFLQPHSSNPQVVSAVSHQGKRN
PKSPLACTNKRPRPEGMQTLESFFKPLTH
Pol Mu
(SEQ ID NO: 57)
MLPKRRRARVGSPSGDAASSTPPSTRFPGVAIYLVEPRMGRSRRAFLTGLARSKGFRVLDACS
SEATHVVMEETSAEEAVSWQERRMAAAPPGCTPPALLDISWLTESLGAGQPVPVECRHRLEV
AGPRKGPLSPAWMPAYACQRPTPLTHHNTGLSEALEILAEAAGFEGSEGRLLTFCRAASVLK
ALPSPVTTLSQLQGLPHFGEHSSRVVQELLEHGVCEEVERVRRSERYQTMKLFTQIFGVGVKT
ADRWYREGLRTLDDLREQPQKLTQQQKAGLQHHQDLSTPVLRSDVDALQQVVEEAVGQAL
PGATVTLTGGFRRGKLQGHDVDFLITHPKEGQEAGLLPRVMCRLQDQGLILYHQHQHSCCES
PTRLAQQSHMDAFERSFCIFRLPQPPGAAVGGSTRPCPSWKAVRVDLVVAPVSQFPFALLGW
TGSKLFQRELRRFSRKEKGLWLNSHGLFDPEQKTFFQAASEEDIFRHLGLEYLPPEQRNA
Pol Iota
(SEQ ID NO: 58)
MEKLGVEPEEEGGGDDDEEDAEAWAMELADVGAAASSQGVHDQVLPTPNASSRVIVHVDL
DCFYAQVEMISNPELKDKPLGVQQKYLVVTCNYEARKLGVKKLMNVRDAKEKCPQLVLVN
GEDLTRYREMSYKVTELLEEFSPVVERLGFDENFVDLTEMVEKRLQQLQSDELSAVTVSGHV
YNNQSINLLDVLHIRLLVGSQIAAEMREAMYNQLGLTGCAGVASNKLLAKLVSGVFKPNQQ
TVLLPESCQHLIHSLNHIKEIPGIGYKTAKCLEALGINSVRDLQTFSPKILEKELGISVAQRIQKL
SFGEDNSPVILSGPPQSFSEEDSFKKCSSEVEAKNKIEELLASLLNRVCQDGRKPHTVRLIIRRY
SSEKHYGRESRQCPIPSHVIQKLGTGNYDVMTPMVDILMKLFRNMVNVKMPFHLTLLSVCFC
NLKALNTAKKGLIDYYLMPSLSTTSRSGKHSFKMKDTHMEDFPKDKETNRDFLPSGRIESTR
TRESPLDTTNFSKEKDINEFPLCSLPEGVDQEVFKQLPVDIQEEILSGKSREKFQGKGSVSCPLH
ASRGVLSFFSKKQMQDIPINPRDHLSSSKQVSSVSPCEPGTSGFNSSSSSYMSSQKDYSYYLDN
RLKDERISQGPKEPQGFHFTNSNPAVSAFHSFPNLQSEQLFSRNHTTDSHKQTVATDSHEGLT
ENREPDSVDEKITFPSDIDPQVFYELPEAVQKELLAEWKRAGSDFHIGHK
Pol Kappa
(SEQ ID NO: 59)
MDSTKEKCDSYKDDLLLRMGLNDNKAGMEGLDKEKINKIIMEATKGSRFYGNELK
KEKQVNQRIENMMQQKAQITSQQLRKAQLQVDRFAMELEQSRNLSNTIVHIDMDAF
YAAVEMRDNPELKDKPIAVGSMSMLSTSNYHARRFGVRAAMPGFIAKRLCPQLIIVP
PNFDKYRAVSKEVKEILADYDPNFMAMSLDEAYLNITKHLEERQNWPEDKRRYFIK
MGSSVENDNPGKEVNKLSEHERSISPLLFEESPSDVQPPGDPFQVNFEEQNNPQILQN
SVVFGTSAQEVVKEIRFRIEQKTTLTASAGIAPNTMLAKVCSDKNKPNGQYQILPNRQ
AVMDFIKDLPIRKVSGIGKVTEKMLKALGIITCTELYQQRALLSLLFSETSWHYFLHIS
LGLGSTHLTRDGERKSMSVERTFSEINKAEEQYSLCQELCSELAQDLQKERLKGRTV
TIKLKNVNFEVKTRASTVSSVVSTAEEIFAIAKELLKTEIDADFPHPLRLRLMGVRISSF
PNEEDRKHQQRSIIGFLQAGNQALSATECTLEKTDKDKFVKPLEMSHKKSFFDKKRS
ERKWSHQDTFKCEAVNKQSFQTSQPFQVLKKKMNENLEISENSDDCQILTCPVCFRA
QGCISLEALNKHVDECLDGPSISENFKMFSCSHVSATKVNKKENVPASSLCEKQDYE
AHPKIKEISSVDCIALVDTIDNSSKAESIDALSNKHSKEECSSLPSKSFNIEHCHQNSSS
TVSLENEDVGSFRQEYRQPYLCEVKTGQALVCPVCNVEQKTSDLTLFNVHVDVCLN
KSFIQELRKDKFNPVNQPKESSRSTGSSSGVQKAVTRTKRPGLMTKYSTSKKIKPNNP
KHTLDIFFK
Pol Alpha
(SEQ ID NO: 60)
MAPVHGDDCEIGASALSDSGSFVSSRARREKKSKKGRQEALERLKKAKAGEKYKYEVEDFT
GVYEEVDEEQYSKLVQARQDDDWIVDDDGIGYVEDGREIFDDDLEDDALDADEKGKDGKA
RNKDKRNVKKLAVTKPNNIKSMFIACAGKKTADKAVDLSKDGLLGDILQDLNTETPQITPPP
VMILKKKRSIGASPNPFSVHTATAVPSGKIASPVSRKEPPLTPVPLKRAEFAGDDVQVESTEEE
QESGAMEFEDGDFDEPMEVEEVDLEPMAAKAWDKESEPAEEVKQEADSGKGTVSYLGSFLP
DVSCWDIDQEGDSSFSVQEVQVDSSHLPLVKGADEEQVFHFYWLDAYEDQYNQPGVVFLFG
KVWIESAETHVSCCVMVKNIERTLYFLPREMKIDLNTGKETGTPISMKDVYEEFDEKIATKYK
IMKFKSKPVEKNYAFEIPDVPEKSEYLEVKYSAEMPQLPQDLKGETFSHVFGTNTSSLELFLM
NRKIKGPCWLEVKSPQLLNQPVSWCKVEAMALKPDLVNVIKDVSPPPLVVMAFSMKTMQN
AKNHQNEIIAMAALVHHSFALDKAAPKPPFQSHFCVVSKPKDCIFPYAFKEVIEKKNVKVEV
AATERTLLGFFLAKVHKIDPDIIVGHNIYGFELEVLLQRINVCKAPHWSKIGRLKRSNMPKLG
GRSGFGERNATCGRMICDVEISAKELIRCKSYHLSELVQQILKTERVVIPMENIQNMYSESSQL
LYLLEHTWKDAKFILQIMCELNVLPLALQITNIAGNIMSRTLMGGRSERNEFLLLHAFYENNY
IVPDKQIFRKPQQKLGDEDEEIDGDTNKYKKGRKKAAYAGGLVLDPKVGFYDKFILLLDENS
LYPSIIQEFNICFTTVQRVASEAQKVTEDGEQEQIPELPDPSLEMGILPREIRKLVERRKQVKQL
MKQQDLNPDLILQYDIRQKALKLTANSMYGCLGFSYSRFYAKPLAALVTYKGREILMHTKE
MVQKMNLEVIYGDTDSIMINTNSTNLEEVFKLGNKVKSEVNKLYKLLEIDIDGVFKSLLLLK
KKKYAALVVEPTSDGNYVTKQELKGLDIVRRDWCDLAKDTGNFVIGQILSDQSRDTIVENIQ
KRLIEIGENVLNGSVPVSQFEINKALTKDPQDYPDKKSLPHVHVALWINSQGGRKVKAGDTV
SYVICQDGSNLTASQRAYAPEQLQKQDNLTIDTQYYLAQQIHPVVARICEPIDGIDAVLIATW
LGLDPTQFRVHHYHKDEENDALLGGPAQLTDEEKYRDCERFKCPCPTCGTENIYDNVFDGSG
TDMEPSLYRCSNIDCKASPLTFTVQLSNKLIMDIRRFIKKYYDGWLICEEPTCRNRTRHLPLQF
SRTGPLCPACMKATLQPEYSDKSLYTQLCFYRYIFDAECALEKLTTDHEKDKLKKQFFTPKV
LQDYRKLKNTAEQFLSRSGYSEVNLSKLFAGCAVKS
Pol Delta
(SEQ ID NO: 61)
[sequence omitted]
Pol Gamma
(SEQ ID NO: 62)
MSRLLWRKVAGATVGPGPVPAPGRWVSSSVPASDPSDGQRRRQQQQQQQQQQQQQPQQPQ
VLSSEGGQLRHNPLDIQMLSRGLHEQIFGQGGEMPGEAAVRRSVEHLQKHGLWGQPAVPLP
DVELRLPPLYGDNLDQHFRLLAQKQSLPYLEAANLLLQAQLPPKPPAWAWAEGWTRYGPEG
EAVPVAIPEERALVFDVEVCLAEGTCPTLAVAISPSAWYSWCSQRLVEERYSWTSQLSPADLI
PLEVPTGASSPTQRDWQEQLVVGHNVSFDRAHIREQYLIQGSRMRFLDTMSMHMAISGLSSF
QRSLWIAAKQGKHKVQPPTKQGQKSQRKARRGPAISSWDWLDISSVNSLAEVHRLYVGGPP
LEKEPRELFVKGTMKDIRENFQDLMQYCAQDVWATHEVFQQQLPLFLERCPHPVTLAGMLE
MGVSYLPVNQNWERYLAEAQGTYEELQREMKKSLMDLANDACQLLSGERYKEDPWLWDL
EWDLQEFKQKKAKKVKKEPATASKLPIEGAGAPGDPMDQEDLGPCSEEEEFQQDVMARACL
QKLKGTTELLPKRPQHLPGHPGWYRKLCPRLDDPAWTPGPSLLSLQMRVTPKLMALTWDGF
PLHYSERHGWGYLVPGRRDNLAKLPTGTTLESAGVVCPYRAIESLYRKHCLEQGKQQLMPQ
EAGLAEEFLLTDNSAIWQTVEELDYLEVEAEAKMENLRAAVPGQPLALTARGGPKDTQPSY
HHGNGPYNDVDIPGCWFFKLPHKDGNSCNVGSPFAKDFLPKMEDGTLQAGPGGASGPRALE
INKMISFWRNAHKRISSQMVVWLPRSALPRAVIRHPDYDEEGLYGAILPQVVTAGTITRRAVE
PTWLTASNARPDRVGSELKAMVQAPPGYTLVGADVDSQELWIAAVLGDAHFAGMHGCTAF
GWMTLQGRKSRGTDLHSKTATTVGISREHAKIFNYGRIYGAGQPFAERLLMQFNHRLTQQE
AAEKAQQMYAATKGLRWYRLSDEGEWLVRELNLPVDRTEGGWISLQDLRKVQRETARKSQ
WKKWEVVAERAWKGGTESEMFNKLESIATSDIPRTPVLGCCISRALEPSAVQEEFMTSRVNW
VVQSSAVDYLHLMLVAMKWLFEEFAIDGRFCISIHDEVRYLVREEDRYRAALALQITNLLTR
CMFAYKLGLNDLPQSVAFFSAVDIDRCLRKEVTMDCKTPSNPTGMERRYGIPQGEALDIYQII
ELTKGSLEKRSQPGP
Pol Nu
(SEQ ID NO: 63)
MENYEALVGFDLCNTPLSSVAQKIMSAMHSGDLVDSKTWGKSTETMEVINKSSVKYSVQLE
DRKTQSPEKKDLKSLRSQTSRGSAKLSPQSFSVRLTDQLSADQKQKSISSLTLSSCLIPQYNQE
ASVLQKKGHKRKHFLMENINNENKGSINLKRKHITYNNLSEKTSKQMALEEDTDDAEGYLN
SGNSGALKKHFCDIRHLDDWAKSQLIEMLKQAAALVITVMYTDGSTQLGADQTPVSSVRGI
VVLVKRQAEGGHGCPDAPACGPVLEGFVSDDPCIYIQIEHSAIWDQEQEAHQQFARNVLFQT
MKCKCPVICFNAKDFVRIVLQFFGNDGSWKHVADFIGLDPRIAAWLIDPSDATPSFEDLVEKY
CEKSITVKVNSTYGNSSRNIVNQNVRENLKTLYRLTMDLCSKLKDYGLWQLFRTLELPLIPIL
AVMESHAIQVNKEEMEKTSALLGARLKELEQEAHFVAGERFLITSNNQLREILFGKLKLHLLS
QRNSLPRTGLQKYPSTSEAVLNALRDLHPLPKIILEYRQVHKIKSTFVDGLLACMKKGSISST
WNQTGTVTGRLSAKHPNIQGISKHPIQITTPKNFKGKEDKILTISPRAMFVSSKGHTFLAADFS
QIELRILTHLSGDPELLKLFQESERDDVFSTLTSQWKDVPVEQVTHADREQTKKVVYAVVYG
AGKERLAACLGVPIQEAAQFLESFLQKYKKIKDFARAAIAQCHQTGCVVSIMGRRRPLPRIHA
HDQQLRAQAERQAVNFVVQGSAADLCKLAMIHVFTAVAASHTLTARLVAQIHDELLFEVED
PQIPECAALVRRTMESLEQVQALELQLQVPLKVSLSAGRSWGHLVPLQEAWGPPPGPCRTES
PSNSLAAPGSPASTQPPPLHFSPSFCL
Rev1
(SEQ ID NO: 64)
MRRGGWRKRAENDGWETWGGYMAAKVQKLEEQFRSDAAMQKDGTSSTIFSGVAIYVNGY
TDPSAEELRKLMMLHGGQYHVYYSRSKTTHIIATNLPNAKIKELKGEKVIRPEWIVESIKAGR
LLSYIPYQLYTKQSSVQKGLSFNPVCRPEDPLPGPSNIAKQLNNRVNHIVKKIETENEVKVNG
MNSWNEEDENNDFSFVDLEQTSPGRKQNGIPHPRGSTAIFNGHTPSSNGALKTQDCLVPMVN
SVASRLSPAFSQEEDKAEKSSTDFRDCTLQQLQQSTRNTDALRNPHRTNSFSLSPLHSNTKING
AHHSTVQGPSSTKSTSSVSTFSKAAPSVPSKPSDCNFISNFYSHSRLHHISMWKCELTEFVNTL
QRQSNGIFPGREKLKKMKTGRSALVVTDTGDMSVLNSPRHQSCIMHVDMDCFFVSVGIRNR
PDLKGKPVAVTSNRGTGRAPLRPGANPQLEWQYYQNKILKGKAADIPDSSLWENPDSAQAN
GIDSVLSRAEIASCSYEARQLGIKNGMFFGHAKQLCPNLQAVPYDFHAYKEVAQTLYETLAS
YTHNIEAVSCDEALVDITEILAETKLTPDEFANAVRMEIKDQTKCAASVGIGSNILLARMATR
KAKPDGQYHLKPEEVDDFIRGQLVTNLPGVGHSMESKLASLGIKTCGDLQYMTMAKLQKEF
GPKTGQMLYRFCRGLDDRPVRTEKERKSVSAEINYGIRFTQPKEAEAFLLSLSEEIQRRLEAT
GMKGKRLTLKIMVRKPGAPVETAKFGGHGICDNIARTVTLDQATDNAKIIGKAMLNMFHTM
KLNISDMRGVGIHVNQLVPTNLNPSTCPSRPSVQSSHFPSGSYSVRDVFQVQKAKKSTEEEHK
EVFRAAVDLEISSASRTCTFLPPFPAHLPTSPDTNKAESSGKWNGLHTPVSVQSRLNLSIEVPSP
SQLDQSVLEALPPDLREQVEQVCAVQQAESHGDKKKEPVNGCNTGILPQPVGTVLLQIPEPQ
ESNSDAGINLIALPAFSQVDPEVFAALPAELQRELKAAYDQRQRQGENSTHQQSASASVPKNP
LLHLKAAVKEKKRNKKKKTIGSPKRIQSPLNNKLLNSPAKTLPGACGSPQKLIDGFLKHEGPP
AEKPLEELSASTSGVPGLSSLQSDPAGCVRPPAPNLAGAVEFNDVKTLLREWITTISDPMEEDI
LQVVKYCTDLIEEKDLEKLDLVIKYMKRLMQQSVESVWNMAFDFILDNVQVVLQQTYGSTL
KVT

### Base Excision Enzymes (BEE)

[0363] A base excision enzyme, or BEE, refers to a protein that is capable of removing a base (e.g., A, T, C, G, or U) from a nucleic acid molecule (e.g., DNA or RNA). In some embodiments, a BEE is capable of removing a cytosine from DNA. In some embodiments, a BEE is capable of removing a thymine from DNA. Exemplary BEEs include, without limitation UDG Tyr147Ala, and UDG Asn204Asp as described in Sang et al., “A Unique Uracil-DNA binding protein of the uracil DNA glycosylase superfamily,” Nucleic Acids Research, Vol. 43, No. 17 2015; the entire contents of which are hereby incorporated by reference.

[0364] In some embodiments, the base excision enzyme (BEE) is a cytosine, thymine, adenine, guanine, or uracil base excision enzyme. In some embodiments, the base excision enzyme (BEE) is a cytosine base excision enzyme. In some embodiments, the BEE is a thymine base excision enzyme. In some embodiments, the base excision enzyme comprises an amino acid sequence that is at least 75%, 80%, 85%, 90%, 95%, 96%, 97%, 98%, 99%, or 99.5% identical to a naturally-occurring BEE. In some embodiments, the base excision enzyme comprises an amino acid sequence that is at least 75%, 80%, 85%, 90%, 95%, 96%, 97%, 98%, 99%, or 99.5% identical to any of the BEEs provided herein, e.g., UDG (Tyr147Ala), or UDG (Asn204Asp), below. In some embodiments, the base excision enzyme comprises an amino acid sequence that is at least 75%, 80%, 85%, 90%, 95%, 96%, 97%, 98%, 99%, or 99.5% identical to any one of SEQ ID NOs: 65-66. In some embodiments, the base excision enzyme comprises the amino acid sequence of any one of SEQ ID NOs: 65-66. In some embodiments, the base excision enzyme has 1, 2, 3, 4, 5, 6, 7, 8, 9, 10, 11, 12, 13, 14, 15, 16, 17, 18, 19, 20, 21, 22, 21, 24, 25, 26, 27, 28, 29, 30, 31, 32, 33, 34, 35, 36, 37, 38, 39, 40, 41, 42, 43, 44, 45, 46, 47, 48, 49, 50, or more amino acid changes compared to any BEE provided herein, such as any one of SEQ ID NOs: 65-66.

[0365] The disclosure also provides fragments of BEEs, such as truncations of any of the BEEs provided herein. In some embodiments, the BEE is an N-terminal truncation, where one or more amino acids are absent from the N-terminus of the BEE. In some embodiments, the BEE is absent 1, 2, 3, 4, 5, 6, 7, 8, 9, 10, 11, 12, 13, 14, 15, 16, 17, 18, 19, 20, 21, 22, 21, 24, 25, 26, 27, 28, 29, 30, 31, 32, 33, 34, 35, 36, 37, 38, 39, 40, 41, 42, 43, 44, 45, 46, 47, 48, 49, or 50 amino acids from the N-terminus of the BEE. For example, the N-terminal truncation of the BEE may be an N-terminal truncation of any BEE provided herein, such as any one of the BEEs provided in any one of SEQ ID NOs: 65-66. In some embodiments, the BEE is a C-terminal truncation, where one or more amino acids are absent from the C-terminus of the BEE. In some embodiments, the BEE is absent 1, 2, 3, 4, 5, 6, 7, 8, 9, 10, 11, 12, 13, 14, 15, 16, 17, 18, 19, 20, 21, 22, 21, 24, 25, 26, 27, 28, 29, 30, 31, 32, 33, 34, 35, 36, 37, 38, 39, 40, 41, 42, 43, 44, 45, 46, 47, 48, 49, or 50 amino acids from the C-terminus of the BEE. For example, the C-terminal truncation of the BEE may be a C-terminal truncation of any BEE provided herein, such as any one of the BEEs provided in any one of SEQ ID NOs: 65-66.

[0366] It should be appreciated that other BEEs would be apparent to the skilled artisan and are within the scope of this disclosure. For example BEEs have been described previously in Sang et al., “A Unique Uracil-DNA binding protein of the uracil DNA glycosylase superfamily,” Nucleic Acids Research, Vol. 43, No. 17 2015; the entire contents of which are hereby incorporated by reference.

UDG (Tyr147Ala)-The mutated residue is indicated
by bold and underlining.
(SEQ ID NO: 65)
MIGQKTLYSFFSPSPARKRHAPSPEPAVQGTGVAGVPEESGDAAAIPAK
KAPAGQEEPGTPPSSPLSAEQLDRIQRNKAAALLRLAARNVPVGFGESW
KKHLSGEFGKPYFIKLMGFVAEERKHYTVYPPPHQVFTWTQMCDIKDVK
VVILGQDPAHGPNQAHGLCFSVQRPVPPPPSLENIYKELSTDIEDFVHP
GHGDLSGWAKQGVLLLNAVLTVRAHQANSHKERGWEQFTDAVVSWLNQN
SNGLVFLLWGSYAQKKGSAIDRKRHHVLQTAHPSPLSVYRGFFGCRHFS
KTNELLQKSGKKPIDWKEL
UDG (Asn204Asp)-The mutated residue is indicated
by bold and underlining.
(SEQ ID NO: 66)
MIGQKTLYSFFSPSPARKRHAPSPEPAVQGTGVAGVPEESGDAAAIPAK
KAPAGQEEPGTPPSSPLSAEQLDRIQRNKAAALLRLAARNVPVGFGESW
KKHLSGEFGKPYFIKLMGFVAEERKHYTVYPPPHQVFTWTQMCDIKDVK
VVILGQDPYHGPNQAHGLCFSVQRPVPPPPSLENIYKELSTDIEDFVHP
GHGDLSGWAKQGVLLLDAVLTVRAHQANSHKERGWEQFTDAVVSWLNQN
SNGLVFLLWGSYAQKKGSAIDRKRHHVLQTAHPSPLSVYRGFFGCRHFS
KTNELLQKSGKKPIDWKEL

### Deaminase Domains

[0367] In some embodiments, any of the fusion proteins or base editors provided herein comprise a cytidine deaminase domain. In some embodiments, the cytidine deaminase domain can catalyze a C to U base change. In some embodiments, the cytidine deaminase domain is an apolipoprotein B mRNA-editing complex (APOBEC) family deaminase. In some embodiments, the cytidine deaminase domain is an APOBEC1 deaminase. In some embodiments, the cytidine deaminase domain is a rat APOBEC1 deaminase (rAPOBEC1). In some embodiments, the cytidine deaminase a variant of rAPOBEC1, such as the R126E+R132E double mutant known as EE deaminase. In some embodiments, the cytidine deaminase domain is a YEE, YE1 or YE2 variant of rAPOBEC1. See Kim et al. Nature Biotechnology (2018).

[0368] In some embodiments, the cytidine deaminase domain is an APOBEC2 deaminase. In some embodiments, the cytidine deaminase domain is an APOBEC3 deaminase. In some embodiments, the cytidine deaminase domain is an APOBEC3A deaminase. In some embodiments, the cytidine deaminase domain is an APOBEC3B deaminase. In some embodiments, the cytidine deaminase domain is an APOBEC3C deaminase. In some embodiments, the cytidine deaminase domain is an APOBEC3D deaminase. In some embodiments, the cytidine deaminase domain is an APOBEC3E deaminase. In some embodiments, the cytidine deaminase domain is an APOBEC3F deaminase. In some embodiments, the cytidine deaminase domain is an APOBEC3G deaminase. In some embodiments, the cytidine deaminase domain is an APOBEC3H deaminase. In some embodiments, the cytidine deaminase domain is an APOBEC4 deaminase. In some embodiments, the cytidine deaminase domain is an activation-induced deaminase (AID). In some embodiments, the cytidine deaminase domain is a vertebrate deaminase. In some embodiments, the cytidine deaminase domain is an invertebrate deaminase. In some embodiments, the cytidine deaminase domain is a human, chimpanzee, gorilla, monkey, cow, dog, rat, or mouse deaminase. In some embodiments, the cytidine deaminase domain is a human deaminase. In some embodiments, the cytidine deaminase domain is a rat deaminase, e.g., rAPOBEC1. In some embodiments, the cytidine deaminase domain is a Petromyzon marinus cytidine deaminase 1 (pmCDA1). In some embodiments, the cytidine deaminase domain is a human APOBEC3G (SEQ ID NO: 77). In some embodiments, the cytidine deaminase domain is a fragment of the human APOBEC3G (SEQ ID NO: 100). In some embodiments, the cytidine deaminase domain is a human APOBEC3G variant comprising a D316R_D317R mutation (SEQ ID NO: 99). In some embodiments, the cytidine deaminase domain is a frantment of the human APOBEC3G and comprising mutations corresponding to the D316R_D317R mutations in SEQ ID NO: 77 (SEQ ID NO: 101).

[0369] In some embodiments, the cytidine deaminase domain is a rat APOBEC3A, such as a human APOBEC3A deaminase. In some embodiments, the cytidine deaminase domain is an evolved human APOBEC3A (eA3A) deaminase (SEQ ID NO: 85). In some embodiments, the cytidine deaminase domain is aAPOBEC3A (eA3A) deaminase comprising a T31A mutation in SEQ ID NO: 93. See Gehrke et al. Nature Biotechnology (2019).

[0370] In some embodiments, the cytidine deaminase domain is an ancestrally reconstructed rAPOBEC1 node 689²⁹ (Anc689). See Koblan, L. W. et al. Nature Biotechnology 36, 843-846 (2018), which is incorporated by reference herein. In some embodiments, the cytidine deaminase domain is at least 80%, at least 85%, at least 90%, at least 92%, at least 95%, at least 96%, at least 97%, at least 98%, at least 99%, or at least 99.5% identical to a naturally-occurring cytidine deaminase. In some embodiments, the cytidine deaminase domain is at least 80%, at least 85%, at least 90%, at least 92%, at least 95%, at least 96%, at least 97%, at least 98%, at least 99%, or at least 99.5% identical to any of the cytidine deaminases provided herein. In some embodiments, the cytidine deaminase domain is at least 80%, at least 85%, at least 90%, at least 92%, at least 95%, at least 96%, at least 97%, at least 98%, at least 99%, or at least 99.5% identical to the deaminase domain of any one of SEQ ID NOs: 67-101. In some embodiments, the nucleic acid editing domain comprises the amino acid sequence of any one of SEQ ID NOs: 67-101. In some embodiments, the cytidine deaminase domain has 1, 2, 3, 4, 5, 6, 7, 8, 9, 10, 11, 12, 13, 14, 15, 16, 17, 18, 19, 20, 21, 22, 21, 24, 25, 26, 27, 28, 29, 30, 31, 32, 33, 34, 35, 36, 37, 38, 39, 40, 41, 42, 43, 44, 45, 46, 47, 48, 49, 50, or more amino acid changes compared to any cytidine deaminase domain provided herein, such as any one of SEQ ID NOs: 67-101.

[0371] The disclosure also provides fragments of cytidine deaminase domains, such as truncations of any of the cytidine deaminase domains provided herein. In some embodiments, the cytidine deaminase domain is an N-terminal truncation, where one or more amino acids are absent from the N-terminus of the cytidine deaminase domain. In some embodiments, the cytidine deaminase domain is absent 1, 2, 3, 4, 5, 6, 7, 8, 9, 10, 11, 12, 13, 14, 15, 16, 17, 18, 19, 20, 21, 22, 21, 24, 25, 26, 27, 28, 29, 30, 31, 32, 33, 34, 35, 36, 37, 38, 39, 40, 41, 42, 43, 44, 45, 46, 47, 48, 49, or 50 amino acids from the N-terminus of the cytidine deaminase domain. For example, the N-terminal truncation of the cytidine deaminase domain may be an N-terminal truncation of any cytidine deaminase domain provided herein, such as any one of the cytidine deaminase domains provided in any one of SEQ ID NOs: 67-101. In some embodiments, the cytidine deaminase domain is a C-terminal truncation, where one or more amino acids are absent from the C-terminus of the cytidine deaminase domain. In some embodiments, the cytidine deaminase domain is absent 1, 2, 3, 4, 5, 6,7, 8, 9, 10, 11, 12, 13, 14, 15, 16, 17, 18, 19, 20, 21, 22, 21, 24, 25, 26, 27, 28, 29, 30, 31, 32, 33, 34, 35, 36, 37, 38, 39, 40, 41, 42, 43, 44, 45, 46, 47, 48, 49, or 50 amino acids from the C-terminus of the cytidine deaminase domain. For example, the C-terminal truncation of the cytidine deaminase domain may be a C-terminal truncation of any cytidine deaminase domain provided herein, such as any one of the cytidine deaminase domains provided in any one of SEQ ID NOs: 67-101.

[0372] Some exemplary cytidine deaminase domains include, without limitation, those provided below. It should be understood that, in some embodiments, the active domain of the respective sequence can be used, e.g., the domain without a localizing signal (nuclear localization sequence, without nuclear export signal, cytoplasmic localizing signal).

Human AID:
(SEQ ID NO: 67)
[sequence omitted]
(underline: nuclear localization sequence; double underline: nuclear export signal)
Mouse AID:
(SEQ ID NO: 68)
MDSLLMKQKKFLYHFKNVRWAKGRHETYLCYVVKRRDSATSCSLDFGHLR
NKSGCHVELLFLRYISDWDLDPGRCYRVTWFTSWSPCYDCARHVAEFLRWNPNLSL
RIFTARLYFCEDRKAEPEGLRRLHRAGVQIGIMTFKDYFYCWNTFVENRERTFKAWE
GLHENSVRLTRQLRRILLPLYEVDDLRDAFRMLGE
(underline: nuclear localization sequence; double underline: nuclear export signal)
Dog AID:
(SEQ ID NO: 69)
MDSLLMKQRKFLYHFKNVRWAKGRHETYLCYVVKRRDSATSFSLDFGHLR
NKSGCHVELLFLRYISDWDLDPGRCYRVTWFTSWSPCYDCARHVADFLRGYPNLSL
RIFAARLYFCEDRKAEPEGLRRLHRAGVQIAIMTFKDYFYCWNTFVENREKTFKAWE
GLHENSVRLSRQLRRILLPLYEVDDLRDAFRTLGL
(underline: nuclear localization sequence; double underline: nuclear export signal)
Bovine AID:
(SEQ ID NO: 70)
MDSLLKKQRQFLYQFKNVRWAKGRHETYLCYVVKRRDSPTSFSLDFGHLRN
KAGCHVELLFLRYISDWDLDPGRCYRVTWFTSWSPCYDCARHVADFLRGYPNLSLR
IFTARLYFCDKERKAEPEGLRRLHRAGVQIAIMTFKDYFYCWNTFVENHERTFKAWE
GLHENSVRLSRQLRRILLPLYEVDDLRDAFRTLGL
(underline: nuclear localization sequence; double underline: nuclear export signal)
Rat AID
MAVGSKPKAALVGPHWERERIWCFLCSTGLGTQQTGQTSRWLRPAATQDPVSPPRS
LLMKQRKFLYHFKNVRWAKGRHETYLCYVVKRRDSATSFSLDFGYLRNKSGCHVE
LLFLRYISDWDLDPGRCYRVTWFTSWSPCYDCARHVADFLRGNPNLSLRIFTARLTG
WGALPAGLMSPARPSDYFYCWNTFVENHERTFKAWEGLHENSVRLSRRLRRILLPL
YEVDDLRDAFRTLGL (SEQ ID NO: 71)
(underline: nuclear localization sequence; double underline: nuclear export signal)
Mouse APOBEC-3:
(SEQ ID NO: 72)
MGPFCLGCSHRKCYSPIRNLISQETFKFHFKNLGYAKGRKDTFLCYEVTRKDC
DSPVSLHHGVFKNKDNIHAEICFLYWFHDKVLKVLSPREEFKITWYMSWSPCFECAEQI
VRFLATHHNLSLDIFSSRLYNVQDPETQQNLCRLVQEGAQVAAMDLYEFKKCWKKF
VDNGGRRFRPWKRLLTNFRYQDSKLQEILRPCYIPVPSSSSSTLSNICLTKGLPETRFC
VEGRRMDPLSEEEFYSQFYNQRVKHLCYYHRMKPYLCYQLEQFNGQAPLKGCLLSE
KGKQHAEILFLDKIRSMELSQVTITCYLTWSPCPNCAWQLAAFKRDRPDLILHIYTSRLY
FHWKRPFQKGLCSLWQSGILVDVMDLPQFTDCWTNFVNPKRPFWPWKGLEIISRRT
QRRLRRIKESWGLQDLVNDFGNLQLGPPMS
(italic: nucleic acid editing domain)
Rat APOBEC-3:
(SEQ ID NO: 73)
MGPFCLGCSHRKCYSPIRNLISQETFKFHFKNLRYAIDRKDTFLCYEVTRKDC
DSPVSLHHGVFKNKDNIHAEICFLYWFHDKVLKVLSPREEFKITWYMSWSPCFECAEQV
LRFLATHHNLSLDIFSSRLYNIRDPENQQNLCRLVQEGAQVAAMDLYEFKKCWKKF
VDNGGRRFRPWKKLLTNFRYQDSKLQEILRPCYIPVPSSSSSTLSNICLTKGLPETRFC
VERRRVHLLSEEEFYSQFYNQRVKHLCYYHGVKPYLCYQLEQFNGQAPLKGCLLSE
KGKQHAEILFLDKIRSMELSQVIITCYLTWSPCPNCAWQLAAFKRDRPDLILHIYTSRLY
FHWKRPFQKGLCSLWQSGILVDVMDLPQFTDCWTNFVNPKRPFWPWKGLEIISRRT
QRRLHRIKESWGLQDLVNDFGNLQLGPPMS
(italic: nucleic acid editing domain)
Rhesus macaque APOBEC-3G:
(SEQ ID NO: 74)
MVEPMDPRTFVSNENNRPILSGLNTVWLCCEVKTKDPSGPPLDAKIFQGKVY
SKAKYHPEMRFLRWFHKWRQLHHDQEYKVTWYVSWSPCTRCANSVATFLAKDPKVTL
TIFVARLYYFWKPDYQQALRILCQKRGGPHATMKIMNYNEFQDCWNKFVDGRGKP
FKPRNNLPKHYTLLQATLGELLRHLMDPGTFTSNFNNKPWVSGQHETYLCYKVERL
HNDTWVPLNQHRGFLRNQAPNIHGFPKGRHAELCFLDLIPFWKLDGQQYRVTCFTSWS
PCFSCAQEMAKFISNNEHVSLCIFAARIYDDQGRYQEGLRALHRDGAKIAMMNYSEF
EYCWDTFVDRQGRPFQPWDGLDEHSQALSGRLRAI
(italic: nucleic acid editing domain; underline: cytoplasmic localization signal)
Chimpanzee APOBEC-3G:
(SEQ ID NO: 75)
MKPHFRNPVERMYQDTESDNFYNRPILSHRNTVWLCYEVKTKGPSRPPLDAK
IFRGQVYSKLKYHPEMRFFHWFSKWRKLHRDQEYEVTWYISWSPCTKCTRDVATFLAE
DPKVTLTIFVARLYYFWDPDYQEALRSLCQKRDGPRATMKIMNYDEFQHCWSKFV
YSQRELFEPWNNLPKYYILLHIMLGEILRHSMDPPTFTSNFNNELWVRGRHETYLCY
EVERLHNDTWVLLNQRRGFLCNQAPHKHGFLEGRHAELCFLDVIPFWKLDLHQDYRV
TCFTSWSPCFSCAQEMAKFISNNKHVSLCIFAARIYDDQGRCQEGLRTLAKAGAKISI
MTYSEFKHCWDTFVDHQGCPFQPWDGLEEHSQALSGRLRAILQNQGN
(italic: nucleic acid editing domain; underline: cytoplasmic localization signal)
Green monkey APOBEC-3G:
(SEQ ID NO: 76)
MNPQIRNMVEQMEPDIFVYYENNRPILSGRNTVWLCYEVKTKDPSGPPLDAN
IFQGKLYPEAKDHPEMKFLHWFRKWRQLHRDQEYEVTWYVSWSPCTRCANSVATFLA
EDPKVTLTIFVARLYYFWKPDYQQALRILCQERGGPHATMKIMNYNEFQHCWNEFV
DGQGKPFKPRKNLPKHYTLLHATLGELLRHVMDPGTFTSNFNNKPWVSGQRETYLC
YKVERSHNDTWVLLNQHRGFLRNQAPDRHGFPKGRHAELCFLDLIPFWKLDDQQYR
VTCFTSWSPCFSCAQKMAKFISNNKHVSLCIFAARIYDDQGRCQEGLRTLHRDGAKIA
VMNYSEFEYCWDTFVDRQGRPFQPWDGLDEHSQALSGRLRAI
(italic: nucleic acid editing domain; underline: cytoplasmic localization signal)
Human APOBEC-3G:
(SEQ ID NO: 77)
MKPHFRNTVERMYRDTESYNFYNRPILSRRNTVWLCYEVKTKGPSRPPLDAK
IFRGQVYSELKYHPEMRFFHWFSKWRKLHRDQEYEVTWYISWSPCTKCTRDMATFLAE
DPKVTLTIFVARLYYFWDPDYQEALRSLCQKRDGPRATMKIMNYDEFQHCWSKFV
YSQRELFEPWNNLPKYYILLHIMLGEILRHSMDPPTFTFNFNNEPWVRGRHETYLCYE
VERMHNDTWVLLNQRRGFLCNQAPHKHGFLEGRHAELCFLDVIPFWKLDLDQDYRV
TCFTSWSPCFSCAQEMAKFISKNKHVSLCIFTARIYDDQGRCQEGLRTLAEAGAKISIM
TYSEFKHCWDTFVDHQGCPFQPWDGLDEHSQDLSGRLRAILQNQEN
(italic: nucleic acid editing domain; underline: cytoplasmic localization signal)
Human APOBEC-3F:
(SEQ ID NO: 78)
MKPHFRNTVERMYRDTFSYNFYNRPILSRRNTVWLCYEVKTKGPSRPRLDAK
IFRGQVYSQPEHHAEMCFLSWFCGNQLPAYKCFQITWFVSWTPCPDCVAKLAEFLAEH
PNVTLTISAARLYYYWERDYRRALCRLSQAGARVKIMDDEEFAYCWENFVYSEGQP
FMPWYKFDDNYAFLHRTLKEILRNPMEAMYPHIFYFHFKNLRKAYGRNESWLCFTM
EVVKHHSPVSWKRGVFRNQVDPETHCHAERCFLSWFCDDILSPNTNYEVTWYTSWSPC
PECAGEVAEFLARHSNVNLTIFTARLYYFWDTDYQEGLRSLSQEGASVEIMGYKDFK
YCWENFVYNDDEPFKPWKGLKYNFLFLDSKLQEILE
(italic: nucleic acid editing domain)
Human APOBEC-3B:
(SEQ ID NO: 79)
MNPQIRNPMERMYRDTFYDNFENEPILYGRSYTWLCYEVKIKRGRSNLLWDT
GVFRGQVYFKPQYHAEMCFLSWFCGNQLPAYKCFQITWFVSWTPCPDCVAKLAEFLS
EHPNVTLTISAARLYYYWERDYRRALCRLSQAGARVTIMDYEEFAYCWENFVYNEG
QQFMPWYKFDENYAFLHRTLKEILRYLMDPDTFTFNFNNDPLVLRRRQTYLCYEVE
RLDNGTWVLMDQHMGFLCNEAKNLLCGFYGRHAELRFLDLVPSLQLDPAQIYRVTWF
ISWSPCFSWGCAGEVRAFLQENTHVRLRIFAARIYDYDPLYKEALQMLRDAGAQVSI
MTYDEFEYCWDTFVYRQGCPFQPWDGLEEHSQALSGRLRAILQNQGN
(italic: nucleic acid editing domain)
Rat APOBEC3:
(SEQ ID NO: 80)
MQPQGLGPNAGMGPVCLGCSHRRPYSPIRNPLKKLYQQTFYFHFKNVRYAW
GRKNNFLCYEVNGMDCALPVPLRQGVFRKQGHIHAELCFIYWFHDKVLRVLSPMEE
FKVTWYMSWSPCSKCAEQVARFLAAHRNLSLAIFSSRLYYYLRNPNYQQKLCRLIQ
EGVHVAAMDLPEFKKCWNKFVDNDGQPFRPWMRLRINFSFYDCKLQEIFSRMNLLR
EDVFYLQFNNSHRVKPVQNRYYRRKSYLCYQLERANGQEPLKGYLLYKKGEQHVEI
LFLEKMRSMELSQVRITCYLTWSPCPNCARQLAAFKKDHPDLILRIYTSRLYFYWRK
KFQKGLCTLWRSGIHVDVMDLPQFADCWTNFVNPQRPFRPWNELEKNSWRIQRRLR
RIKESWGL
Bovine APOBEC-3B:
(SEQ ID NO: 81)
DGWEVAFRSGTVLKAGVLGVSMTEGWAGSGHPGQGACVWTPGTRNTMNL
LREVLFKQQFGNQPRVPAPYYRRKTYLCYQLKQRNDLTLDRGCFRNKKQRHAEIRFI
DKINSLDLNPSQSYKIICYITWSPCPNCANELVNFITRNNHLKLEIFASRLYFHWIKSFK
MGLQDLQNAGISVAVMTHTEFEDCWEQFVDNQSRPFQPWDKLEQYSASIRRRLQRI
LTAPI
Chimpanzee APOBEC-3B:
(SEQ ID NO: 82)
MNPQIRNPMEWMYQRTFYYNFENEPILYGRSYTWLCYEVKIRRGHSNLLWDTGVFR
GQMYSQPEHHAEMCFLSWFCGNQLSAYKCFQITWFVSWTPCPDCVAKLAKFLAEH
PNVTLTISAARLYYYWERDYRRALCRLSQAGARVKIMDDEEFAYCWENFVYNEGQP
FMPWYKFDDNYAFLHRTLKEIIRHLMDPDTFTFNFNNDPLVLRRHQTYLCYEVERLD
NGTWVLMDQHMGFLCNEAKNLLCGFYGRHAELRFLDLVPSLQLDPAQIYRVTWFIS
WSPCFSWGCAGQVRAFLQENTHVRLRIFAARIYDYDPLYKEALQMLRDAGAQVSIM
TYDEFEYCWDTFVYRQGCPFQPWDGLEEHSQALSGRLRAILQVRASSLCMVPHRPPP
PPQSPGPCLPLCSEPPLGSLLPTGRPAPSLPFLLTASFSFPPPASLPPLPSLSLSPGHLPVP
SFHSLTSCSIQPPCSSRIRETEGWASVSKEGRDLG
Human APOBEC-3C:
(SEQ ID NO: 83)
MNPQIRNPMKAMYPGTFYFQFKNLWEANDRNETWLCFTVEGIKRRSVVSWK
TGVFRNQVDSETHCHAERCFLSWFCDDILSPNTKYQVTWYTSWSPCPDCAGEVAEFLA
RHSNVNLTIFTARLYYFQYPCYQEGLRSLSQEGVAVEIMDYEDFKYCWENFVYNDN
EPFKPWKGLKTNFRLLKRRLRESLQ
(italic: nucleic acid editing domain)
Gorilla APOBEC3C
(SEQ ID NO: 84)
MNPQIRNPMKAMYPGTFYFQFKNLWEANDRNETWLCFTVEGIKRRSVVSWKTGVF
RNQVDSETHCHAERCFLSWFCDDILSPNTNYQVTWYTSWSPCPECAGEVAEFLARHSN
VNLTIFTARLYYFQDTDYQEGLRSLSQEGVAVKIMDYKDFKYCWENFVYNDDEPFK
PWKGLKYNFRFLKRRLQEILE
(italic: nucleic acid editing domain)
Human APOBEC-3A:
(SEQ ID NO: 85)
MEASPASGPRHLMDPHIFTSNFNNGIGRHKTYLCYEVERLDNGTSVKMDQHR
GFLHNQAKNLLCGFYGRHAELRFLDLVPSLQLDPAQIYRVTWFISWSPCFSWGCAGEVR
AFLQENTHVRLRIFAARIYDYDPLYKEALQMLRDAGAQVSIMTYDEFKHCWDTFVD
HQGCPFQPWDGLDEHSQALSGRLRAILQNQGN
(italic: nucleic acid editing domain)
Rhesus macaque APOBEC-3A:
(SEQ ID NO: 86)
MDGSPASRPRHLMDPNTFTFNFNNDLSVRGRHQTYLCYEVERLDNGTWVPMDERR
GFLCNKAKNVPCGDYGCHVELRFLCEVPSWQLDPAQTYRVTWFISWSPCFRRGCAGQ
VRVFLQENKHVRLRIFAARIYDYDPLYQEALRTLRDAGAQVSIMTYEEFKHCWDTF
VDRQGRPFQPWDGLDEHSQALSGRLRAILQNQGN
(italic: nucleic acid editing domain)
Bovine APOBEC-3A:
(SEQ ID NO: 87)
MDEYTFTENFNNQGWPSKTYLCYEMERLDGDATIPLDEYKGFVRNKGLDQPEKPCH
AELYFLGKIHSWNLDRNQHYRLTCFISWSPCYDCAQKLTTFLKENHHISLHILASRIYTH
NRFGCHQSGLCELQAAGARITIMTFEDFKHCWETFVDHKGKPFQPWEGLNVKSQAL
CTELQAILKTQQN
(italic: nucleic acid editing domain)
Human APOBEC-3H:
(SEQ ID NO: 88)
MALLTAETFRLQFNNKRRLRRPYYPRKALLCYQLTPQNGSTPTRGYFENKKK
CHAEICFINEIKSMGLDETQCYQVTCYLTWSPCSSCAWELVDFIKAHDHLNLGIFASRLY
YHWCKPQQKGLRLLCGSQVPVEVMGFPKFADCWENFVDHEKPLSFNPYKMLEELD
KNSRAIKRRLERIKIPGVRAQGRYMDILCDAEV
(italic: nucleic acid editing domain)
Rhesus macaque APOBEC-3H:
(SEQ ID NO: 89)
MALLTAKTFSLQFNNKRRVNKPYYPRKALLCYQLTPQNGSTPTRGHLKNKK
KDHAEIRFINKIKSMGLDETQCYQVTCYLTWSPCPSCAGELVDFIKAHRHLNLRIFAS
RLYYHWRPNYQEGLLLLCGSQVPVEVMGLPEFTDCWENFVDHKEPPSFNPSEKLEE
LDKNSQAIKRRLERIKSRSVDVLENGLRSLQLGPVTPSSSIRNSR
Human APOBEC-3D:
(SEQ ID NO: 90)
MNPQIRNPMERMYRDTFYDNFENEPILYGRSYTWLCYEVKIKRGRSNLLWDTGVFR
GPVLPKRQSNHRQEVYFRFENHAEMCFLSWFCGNRLPANRRFQITWFVSWNPCLPCVV
KVTKFLAEHPNVTLTISAARLYYYRDRDWRWVLLRLHKAGARVKIMDYEDFAYCW
ENFVCNEGQPFMPWYKFDDNYASLHRTLKEILRNPMEAMYPHIFYFHFKNLLKACG
RNESWLCFTMEVTKHHSAVFRKRGVFRNQVDPETHCHAERCFLSWFCDDILSPNTNY
EVTWYTSWSPCPECAGEVAEFLARHSNVNLTIFTARLCYFWDTDYQEGLCSLSQEGAS
VKIMGYKDFVSCWKNFVYSDDEPFKPWKGLQTNFRLLKRRLREILQ
(italic: nucleic acid editing domain)
Human APOBEC-1:
(SEQ ID NO: 91)
MTSEKGPSTGDPTLRRRIEPWEFDVFYDPRELRKEACLLYEIKWGMSRKIWRS
SGKNTTNHVEVNFIKKFTSERDFHPSMSCSITWFLSWSPCWECSQAIREFLSRHPGVT
LVIYVARLFWHMDQQNRQGLRDLVNSGVTIQIMRASEYYHCWRNFVNYPPGDEAH
WPQYPPLWMMLYALELHCIILSLPPCLKISRRWQNHLTFFRLHLQNCHYQTIPPHILL
ATGLIHPSVAWR
Mouse APOBEC-1:
(SEQ ID NO: 92)
MSSETGPVAVDPTLRRRIEPHEFEVFFDPRELRKETCLLYEINWGGRHSVWRH
TSQNTSNHVEVNFLEKFTTERYFRPNTRCSITWFLSWSPCGECSRAITEFLSRHPYVTL
FIYIARLYHHTDQRNRQGLRDLISSGVTIQIMTEQEYCYCWRNFVNYPPSNEAYWPR
YPHLWVKLYVLELYCIILGLPPCLKILRRKQPQLTFFTITLQTCHYQRIPPHLLWATGL
K
Rat APOBEC-1:
(SEQ ID NO: 93)
MSSETGPVAVDPTLRRRIEPHEFEVFFDPRELRKETCLLYEINWGGRHSIWRH
TSQNTNKHVEVNFIEKFTTERYFCPNTRCSITWFLSWSPCGECSRAITEFLSRYPHVTL
FIYIARLYHHADPRNRQGLRDLISSGVTIQIMTEQESGYCWRNFVNYSPSNEAHWPR
YPHLWVRLYVLELYCIILGLPPCLNILRRKQPQLTFFTIALQSCHYQRLPPHILWATGL
K
Human APOBEC-2:
(SEQ ID NO: 94)
MAQKEEAAVATEAASQNGEDLENLDDPEKLKELIELPPFEIVTGERLPANFFK
FQFRNVEYSSGRNKTFLCYVVEAQGKGGQVQASRGYLEDEHAAAHAEEAFFNTILP
AFDPALRYNVTWYVSSSPCAACADRIIKTLSKTKNLRLLILVGRLFMWEEPEIQAALK
KLKEAGCKLRIMKPQDFEYVWQNFVEQEEGESKAFQPWEDIQENFLYYEEKLADIL
K
Mouse APOBEC-2:
(SEQ ID NO: 95)
MAQKEEAAEAAAPASQNGDDLENLEDPEKLKELIDLPPFEIVTGVRLPVNFFK
FQFRNVEYSSGRNKTFLCYVVEVQSKGGQAQATQGYLEDEHAGAHAEEAFFNTILP
AFDPALKYNVTWYVSSSPCAACADRILKTLSKTKNLRLLILVSRLFMWEEPEVQAAL
KKLKEAGCKLRIMKPQDFEYIWQNFVEQEEGESKAFEPWEDIQENFLYYEEKLADIL
K
Rat APOBEC-2:
(SEQ ID NO: 96)
MAQKEEAAEAAAPASQNGDDLENLEDPEKLKELIDLPPFEIVTGVRLPVNFFK
FQFRNVEYSSGRNKTFLCYVVEAQSKGGQVQATQGYLEDEHAGAHAEEAFFNTILP
AFDPALKYNVTWYVSSSPCAACADRILKTLSKTKNLRLLILVSRLFMWEEPEVQAAL
KKLKEAGCKLRIMKPQDFEYLWQNFVEQEEGESKAFEPWEDIQENFLYYEEKLADIL
K
Bovine APOBEC-2:
(SEQ ID NO: 97)
MAQKEEAAAAAEPASQNGEEVENLEDPEKLKELIELPPFEIVTGERLPAHYFK
FQFRNVEYSSGRNKTFLCYVVEAQSKGGQVQASRGYLEDEHATNHAEEAFFNSIMP
TFDPALRYMVTWYVSSSPCAACADRIVKTLNKTKNLRLLILVGRLFMWEEPEIQAAL
RKLKEAGCRLRIMKPQDFEYIWQNFVEQEEGESKAFEPWEDIQENFLYYEEKLADIL
K
Petromyzon marinus CDA1 (pmCDA1)
(SEQ ID NO: 98)
MTDAEYVRIHEKLDIYTFKKQFFNNKKSVSHRCYVLFELKRRGERRACFWGYAVNK
PQSGTERGIHAEIFSIRKVEEYLRDNPGQFTINWYSSWSPCADCAEKILEWYNQELRG
NGHTLKIWACKLYYEKNARNQIGLWNLRDNGVGLNVMVSEHYQCCRKIFIQSSHNQ
LNENRWLEKTLKRAEKRRSELSIMIQVKILHTTKSPAV
Human APOBEC3G D316R_D317R
(SEQ ID NO: 99)
MKPHFRNTVERMYRDTFSYNFYNRPILSRRNTVWLCYEVKTKGPSRPPLDAKIFRGQ
VYSELKYHPEMRFFHWFSKWRKLHRDQEYEVTWYISWSPCTKCTRDMATFLAEDP
KVTLTIFVARLYYFWDPDYQEALRSLCQKRDGPRATMKIMNYDEFQHCWSKFVYS
QRELFEPWNNLPKYYILLHIMLGEILRHSMDPPTFTFNENNEPWVRGRHETYLCYEV
ERMHNDTWVLLNQRRGFLCNQAPHKHGFLEGRHAELCFLDVIPFWKLDLDQDYRV
TCFTSWSPCFSCAQEMAKFISKNKHVSLCIFTARIYRRQGRCQEGLRTLAEAGAKISI
MTYSEFKHCWDTFVDHQGCPFQPWDGLDEHSQDLSGRLRAILQNQEN
Human APOBEC3G chain A
(SEQ ID NO: 100)
MDPPTFTFNFNNEPWVRGRHETYLCYEVERMHNDTWVLLNQRRGFLCNQAPHKHG
FLEGRHAELCFLDVIPFWKLDLDQDYRVTCFTSWSPCFSCAQEMAKFISKNKHVSLCI
FTARIYDDQGRCQEGLRTLAEAGAKISIMTYSEFKHCWDTFVDHQGCPFQPWDGLD
EHSQDLSGRLRAILQ
Human APOBEC3G chain A D120R_D121R
(SEQ ID NO: 101)
MDPPTFTFNFNNEPWVRGRHETYLCYEVERMHNDTWVLLNQRRGFLCNQAP
HKHGFLEGRHAELCFLDVIPFWKLDLDQDYRVTCFTSWSPCFSCAQEMAKFISKNKH
VSLCIFTARIYRRQGRCQEGLRTLAEAGAKISIMTYSEFKHCWDTFVDHQGCPFQPW
DGLDEHSQDLSGRLRAILQ

Deaminase Domains that Modulate the Editing Window of Base Editors

[0373] Some aspects of the disclosure are based on the recognition that modulating the deaminase domain catalytic activity of any of the fusion proteins provided herein, for example by making point mutations in the deaminase domain, affect the processivity of the fusion proteins (e.g., base editors). For example, mutations that reduce, but do not eliminate, the catalytic activity of a deaminase domain within a base editing fusion protein can make it less likely that the deaminase domain will catalyze the deamination of a residue adjacent to a target residue, thereby narrowing the deamination window. The ability to narrow the deaminataion window may prevent unwanted deamination of residues adjacent of specific target residues, which may decrease or prevent off-target effects.

[0374] In some embodiments, any of the fusion proteins provided herein comprise a deaminase domain (e.g., a cytidine deaminase domain) that has reduced catalytic deaminase activity. In some embodiments, any of the fusion proteins provided herein comprise a deaminase domain (e.g., a cytidine deaminase domain) that has a reduced catalytic deaminase activity as compared to an appropriate control. For example, the appropriate control may be the deaminase activity of the deaminase prior to introducing one or more mutations into the deaminase. In other embodiments, the appropriate control may be a wild-type deaminase. In some embodiments, the appropriate control is a wild-type apolipoprotein B mRNA-editing complex (APOBEC) family deaminase. In some embodiments, the appropriate control is an APOBEC1 deaminase, an APOBEC2 deaminase, an APOBEC3A deaminase, an APOBEC3B deaminase, an APOBEC3C deaminase, an APOBEC3D deaminase, an APOBEC3F deaminase, an APOBEC3G deaminase, or an APOBEC3H deaminase. In some embodiments, the appropriate control is an activation induced deaminase (AID). In some embodiments, the appropriate control is a cytidine deaminase 1 from Petromyzon marinus (pmCDA1). In some embodiments, the deaminase domain may be a deaminase domain that has at least 1%, at least 5%, at least 15%, at least 20%, at least 25%, at least 30%, at least 40%, at least 50%, at least 60%, at least 70%, at least 80%, at least 90%, or at least 95% less catalytic deaminase activity as compared to an appropriate control.

[0375] In some embodiments, any of the fusion proteins provided herein comprise an APOBEC deaminase comprising one or more mutations selected from the group consisting of H121X, H122X, R126X, R126X, R118X, W90X, W90X, and R132X of rAPOBEC1 (SEQ ID NO: 93), or one or more corresponding mutations in another APOBEC deaminase, wherein X is any amino acid. In some embodiments, any of the fusion proteins provided herein comprise an APOBEC deaminase comprising one or more mutations selected from the group consisting of H121R, H122R, R126A, R126E, R118A, W90A, W90Y, and R132E of rAPOBEC1 (SEQ ID NO: 93), or one or more corresponding mutations in another APOBEC deaminase.

[0376] In some embodiments, any of the fusion proteins provided herein comprise an APOBEC deaminase comprising one or more mutations selected from the group consisting of D316X, D317X, R320X, R320X, R313X, W285X, W285X, R326X of hAPOBEC3G (SEQ ID NO: 77), or one or more corresponding mutations in another APOBEC deaminase, wherein X is any amino acid. In some embodiments, any of the fusion proteins provided herein comprise an APOBEC deaminase comprising one or more mutations selected from the group consisting of D316R, D317R, R320A, R320E, R313A, W285A, W285Y, R326E of hAPOBEC3G (SEQ ID NO: 77), or one or more corresponding mutations in another APOBEC deaminase.

[0377] In some embodiments, any of the fusion proteins provided herein comprise an APOBEC deaminase comprising a H121R and a H122R mutation of rAPOBEC1 (SEQ ID NO: 93), or one or more corresponding mutations in another APOBEC deaminase. In some embodiments, any of the fusion proteins provided herein comprise an APOBEC deaminase comprising a R126A mutation of rAPOBEC1 (SEQ ID NO: 93), or one or more corresponding mutations in another APOBEC deaminase. In some embodiments, any of the fusion proteins provided herein comprise an APOBEC deaminase comprising a R126E mutation of rAPOBEC1 (SEQ ID NO: 93), or one or more corresponding mutations in another APOBEC deaminase. In some embodiments, any of the fusion proteins provided herein comprise an APOBEC deaminase comprising a R118A mutation of rAPOBEC1 (SEQ ID NO: 93), or one or more corresponding mutations in another APOBEC deaminase. In some embodiments, any of the fusion proteins provided herein comprise an APOBEC deaminase comprising a W90A mutation of rAPOBEC1 (SEQ ID NO: 93), or one or more corresponding mutations in another APOBEC deaminase. In some embodiments, any of the fusion proteins provided herein comprise an APOBEC deaminase comprising a W90Y mutation of rAPOBEC1 (SEQ ID NO: 93), or one or more corresponding mutations in another APOBEC deaminase. In some embodiments, any of the fusion proteins provided herein comprise an APOBEC deaminase comprising a R132E mutation of rAPOBEC1 (SEQ ID NO: 93), or one or more corresponding mutations in another APOBEC deaminase. In some embodiments, any of the fusion proteins provided herein comprise an APOBEC deaminase comprising a W90Y and a R126E mutation of rAPOBEC1 (SEQ ID NO: 93), or one or more corresponding mutations in another APOBEC deaminase. In some embodiments, any of the fusion proteins provided herein comprise an APOBEC deaminase comprising a R126E and a R132E mutation of rAPOBEC1 (SEQ ID NO: 93), or one or more corresponding mutations in another APOBEC deaminase. In some embodiments, any of the fusion proteins provided herein comprise an APOBEC deaminase comprising a W90Y and a R132E mutation of rAPOBEC1 (SEQ ID NO: 93), or one or more corresponding mutations in another APOBEC deaminase. In some embodiments, any of the fusion proteins provided herein comprise an APOBEC deaminase comprising a W90Y, R126E, and R132E mutation of rAPOBEC1 (SEQ ID NO: 93), or one or more corresponding mutations in another APOBEC deaminase.

[0378] In some embodiments, any of the fusion proteins provided herein comprise an APOBEC deaminase comprising a D316R and a D317R mutation of hAPOBEC3G (SEQ ID NO: 77), or one or more corresponding mutations in another APOBEC deaminase. In some embodiments, any of the fusion proteins provided herein comprise an APOBEC deaminase comprising a R320A mutation of hAPOBEC3G (SEQ ID NO: 77), or one or more corresponding mutations in another APOBEC deaminase. In some embodiments, any of the fusion proteins provided herein comprise an APOBEC deaminase comprising a R320E mutation of hAPOBEC3G (SEQ ID NO: 77), or one or more corresponding mutations in another APOBEC deaminase. In some embodiments, any of the fusion proteins provided herein comprise an APOBEC deaminase comprising a R313A mutation of hAPOBEC3G (SEQ ID NO: 77), or one or more corresponding mutations in another APOBEC deaminase.

[0379] In some embodiments, any of the fusion proteins provided herein comprise an APOBEC deaminase comprising a W285A mutation of hAPOBEC3G (SEQ ID NO: 77), or one or more corresponding mutations in another APOBEC deaminase. In some embodiments, any of the fusion proteins provided herein comprise an APOBEC deaminase comprising a W285Y mutation of hAPOBEC3G (SEQ ID NO: 77), or one or more corresponding mutations in another APOBEC deaminase. In some embodiments, any of the fusion proteins provided herein comprise an APOBEC deaminase comprising a R326E mutation of hAPOBEC3G (SEQ ID NO: 77), or one or more corresponding mutations in another APOBEC deaminase. In some embodiments, any of the fusion proteins provided herein comprise an APOBEC deaminase comprising a W285Y and a R320E mutation of hAPOBEC3G (SEQ ID NO: 77), or one or more corresponding mutations in another APOBEC deaminase. In some embodiments, any of the fusion proteins provided herein comprise an APOBEC deaminase comprising a R320E and a R326E mutation of hAPOBEC3G (SEQ ID NO: 77), or one or more corresponding mutations in another APOBEC deaminase. In some embodiments, any of the fusion proteins provided herein comprise an APOBEC deaminase comprising a W285Y and a R326E mutation of hAPOBEC3G (SEQ ID NO: 77), or one or more corresponding mutations in another APOBEC deaminase. In some embodiments, any of the fusion proteins provided herein comprise an APOBEC deaminase comprising a W285Y, R320E, and R326E mutation of hAPOBEC3G (SEQ ID NO: 77), or one or more corresponding mutations in another APOBEC deaminase.

Fusion Proteins Comprising a Nuclease Programmable DNA Binding Protein (napDNAbp), a Cytidine Deaminase, and Multiple Uracil Binding Protein (UBP) Domains

[0380] Some aspects of the disclosure provide fusion proteins comprising a nucleic acid programmable DNA binding protein (napDNAbp), a cytidine deaminase, and a first and second uracil binding protein (UBP) domain. In some embodiments, any of the fusion proteins provided herein are base editors. In some embodiments, the UBP is a uracil modifying enzyme. In some embodiments, the UBP is a uracil base excision enzyme. In some embodiments, the UBP is a uracil DNA glycosylase. In some embodiments, the UBP is any of the uracil binding proteins provided herein. For example, the UBP may be a UDG, a UdgX, a UdgX*, a UdgX_On, or a SMUG1. In particular embodiments, the UBP domain is a UdgX. In some embodiments, the UBP comprises an amino acid sequence that is at least 75%, 80%, 85%, 90%, 95%, 96%, 97%, 98%, 99%, or 99.5% identical to a uracil binding protein, a uracil base excision enzyme or a uracil DNA glycosylase (UDG) enzyme. In some embodiments, the UBP comprises an amino acid sequence that is at least 75%, 80%, 85%, 90%, 95%, 96%, 97%, 98%, 99%, or 99.5% identical to any of the uracil binding proteins provided herein. For example, the UBP may comprise an amino acid sequence that is at least 75%, 80%, 85%, 90%, 95%, 96%, 97%, 98%, 99%, or 99.5% identical to any one of SEQ ID NOs: 48-53. In some embodiments, the UBP comprises the amino acid sequence of any one of SEQ ID NOs: 48-53.

[0381] In some embodiments, the napDNAbp is a Cas9 domain, a Cpf1 domain, a CasX domain, a CasY domain, a C2c1 domain, a C2c2 domain, aC2c3 domain, or an Argonaute domain. In some embodiments, the napDNAbp is any napDNAbp provided herein. In some embodiments, the napDNAbp is a Cas9 nickase, such as an nCas9-NG or a HF-nCas9 (or HF-nCas9-NG). The nCas9-NG variant has a PAM that corresponds to NGN. In some embodiments, the napDNAbp of any of the fusion proteins provided herein is a Cas9 domain. The Cas9 domain may be any of the Cas9 domains or Cas9 proteins (e.g., nCas9) provided herein. In some embodiments, any of the Cas9 domains or Cas9 proteins (e.g., nCas9) provided herein may be fused with any of the cytidine deaminases provided herein.

[0382] In some embodiments, the fusion protein wherein the fusion protein comprises the structure [cytidine deaminase domain]-[first UBP domain]-[napDNAbp domain], wherein each instance of “]-[” comprises an optional linker. The cytidine deaminase and the first UBP domain, and/or the first UBP domain and the napDNAbp domain, may be fused via a linker, such as a linker comprising the amino acid sequence of any one of SEQ ID NOs: 102-109 and 441. In particular embodiments, the fusion protein comprises the structure [cytidine deaminase domain]-[UdgX protein]-[Cas9 nickase], wherein each instance of “]-[” comprises an optional linker. In some embodiments, the fusion protein comprises the “AXC” architecture.

[0383] In some embodiments of the disclosed base editing fusion proteins, the second UBP domain and the cytidine deaminase domain are fused via a linker comprising the amino acid sequence of any one of SEQ ID NOs: 102-109 and 441. In some embodiments, the DNA repair protein and the cytidine deaminase domain are fused via a linker comprising the amino acid sequence of any one of SEQ ID NOs: 102-109 and 441. In some embodiments, the napDNAbp domain and the DNA repair protein are fused via a linker comprising the amino acid sequence of any one of SEQ ID NOs: 102-109 and 441. In some embodiments, the napDNAbp domain and the second DNA repair protein are fused via a linker comprising the amino acid sequence of any one of SEQ ID NOs: 102-109 and 441.

[0384] In some embodiments, any of the disclosed fusion proteins comprise the structure:
[0385] NH₂-[second UBP domain]-[cytidine deaminase domain]-[first UBP domain]-[napDNAbp domain]-COOH; or
[0386] NH₂-[second UBP domain]-[cytidine deaminase domain]-[first UBP domain]-[napDNAbp domain]-[third UBP domain]-COOH.

[0387] In some embodiments, the fusion proteins comprising a cytidine deaminase, a napDNAbp (e.g., Cas9 domain), and first and second UBP domains do not include a linker sequence. In some embodiments, a linker is present between the cytidine deaminase domain and the napDNAbp. In some embodiments, a linker is present between the cytidine deaminase domain and the UBP domains. In some embodiments, a linker is present between the napDNAbp and the UBP domains. In some embodiments, the “]-[” used in the general architecture above indicates the presence of an optional linker. In some embodiments, the cytidine deaminase and the napDNAbp, the cytidine deaminase and the first and/or second UBP domain, and/or the napDNAbp and the first and/or second UBP domain are fused via any of the linkers provided herein. For example, in some embodiments the cytidine deaminase and the napDNAbp, the cytidine deaminase and the first and/or second UBP domain, and/or the napDNAbp and the first and/or second UBP domain are fused via any of the linkers provided below in the section entitled “Linkers”. In some embodiments, the cytidine deaminase and the napDNAbp, the cytidine deaminase and the first and/or second UBP domain, and/or the napDNAbp and the first and/or second UBP domain are fused via a linker that comprises between 1 and 200 amino acids. In some embodiments, the cytidine deaminase and the napDNAbp, the cytidine deaminase and the first and/or second UBP domain, and/or the napDNAbp and the first and/or second UBP domain are fused via a linker that comprises from 1 to 5, 1 to 10, 1 to 20, 1 to 30, 1 to 40, 1 to 50, 1 to 60, 1 to 80, 1 to 100, 1 to 150, 1 to 200, 5 to 10, 5 to 20, 5 to 30, 5 to 40, 5 to 60, 5 to 80, 5 to 100, 5 to 150, 5 to 200, 10 to 20, 10 to 30, 10 to 40, 10 to 50, 10 to 60, 10 to 80, 10 to 100, 10 to 150, 10 to 200, 20 to 30, 20 to 40, 20 to 50, 20 to 60, 20 to 80, 20 to 100, 20 to 150, 20 to 200, 30 to 40, 30 to 50, 30 to 60, 30 to 80, 30 to 100, 30 to 150, 30 to 200, 40 to 50, 40 to 60, 40 to 80, 40 to 100, 40 to 150, 40 to 200, 50 to 60 50 to 80, 50 to 100, 50 to 150, 50 to 200, 60 to 80, 60 to 100, 60 to 150, 60 to 200, 80 to 100, 80 to 150, 80 to 200, 100 to 150, 100 to 200, or 150 to 200 amino acids in length. In some embodiments, the cytidine deaminase and the napDNAbp, the cytidine deaminase and the first and/or second UBP domain, and/or the napDNAbp and the first and/or second UBP domain are fused via a linker that comprises 4, 16, 24, 32, 60, 91 or 104 amino acids in length. In some embodiments, the cytidine deaminase and the napDNAbp, the cytidine deaminase and the first and/or second UBP domain, and/or the napDNAbp and the first and/or second UBP domain are fused via a linker that comprises the amino acid sequence of SGSETPGTSESATPES (SEQ ID NO: 102), SGGS (SEQ ID NO: 103), SGGSSGSETPGTSESATPESSGGS (SEQ ID NO: 107), SGGSSGGSSGSETPGTSESATPESSGGSSGGS (SEQ ID NO: 108), SGGSSGGSSGSETPGTSESATPESAGSYPYDVPDYAGSAAPAAKKKKLDGSGSGGSS GGS (SEQ ID NO: 441), GGSGGSPGSPAGSPTSTEEGTSESATPESGPGTSTEPSEGSAPGSPAGSPTSTEEGTSTE PSEGSAPGTSTEPSEGSAPGTSESATPESGPGSEPATSGGSGGS (SEQ ID NO: 109), or SGGSGGSGGS (SEQ ID NO: 120). In some embodiments, the cytidine deaminase and the napDNAbp, the cytidine deaminase and the first and/or second UBP domain, and/or the napDNAbp and the first and/or second UBP domain are fused via a linker comprising the amino acid sequence SGSETPGTSESATPES (SEQ ID NO: 102), which may also be referred to as the XTEN linker.

Fusion Proteins Comprising a Nuclease Programmable DNA Binding Protein (napDNAbp), a Cytidine Deaminase, a First Uracil Binding Protein Domain and a DNA Repair Protein

[0388] Some aspects of the disclosure provide fusion proteins comprising a nucleic acid programmable DNA binding protein (napDNAbp), a cytidine deaminase, a first UBP domain and a DNA repair protein. The DNA repair protein may be selected from a DNA polymerase, an exonuclease, an RNA binding motif protein, an E3 ligase, and a translesion polymerase. In particular embodiments, the DNA repair protein is one of POLD2, RBMX, and EXO1. In some embodiments, the DNA repair protein is a nucleic acid polymerase, such as a DNA polymerase (e.g., a translesion polymerase). In various embodiments, the DNA repair protein is selected from DNA polymerase D1 (POLD1), DNA polymerase D2 (POLD2), and DNA polymerase D3 (POLD3).

[0389] In some embodiments, the napDNAbp is a Cas9 nickase. In some embodiments, the napDNAbp is any napDNAbp provided herein. In some embodiments, the napDNAbp of any of the fusion proteins provided herein is a Cas9 domain. The Cas9 domain may be any of the Cas9 domains or Cas9 proteins (e.g., dCas9 or nCas9) provided herein. In some embodiments, any of the Cas9 domains or Cas9 proteins (e.g., dCas9 or nCas9) provided herein may be fused with any of the cytidine deaminases provided herein.

[0390] In some embodiments, any of the disclosed fusion proteins comprise the structure:
[0391] NH₂-[second UBP domain]-[cytidine deaminase domain]-[first UBP domain]-[napDNAbp domain]-[DNA repair protein]-COOH;
[0392] NH₂-[DNA repair protein]-[cytidine deaminase domain]-[first UBP domain]-[napDNAbp domain]-COOH;
[0393] NH₂-[DNA repair protein]-[cytidine deaminase domain]-[first UBP domain]-[napDNAbp domain]-[second UBP domain]-COOH; and
[0394] NH₂-[DNA repair protein]-[cytidine deaminase domain]-[first UBP domain]-[napDNAbp domain]-[second DNA repair protein]-COOH; or
[0395] NH₂-[DNA repair protein]-[cytidine deaminase domain]-[first UBP domain]-[napDNAbp domain]-[second DNA repair protein]-[second UBP domain]-COOH.

[0396] In some embodiments, the fusion proteins comprising a cytidine deaminase, a napDNAbp (e.g., Cas9 domain) domain, first UBP domain, and DNA repair protein do not include a linker sequence. In some embodiments, a linker is present between the cytidine deaminase domain and the napDNAbp domain. In some embodiments, a linker is present between the cytidine deaminase domain and the first UBP domain. In some embodiments, a linker is present between the cytidine deaminase domain, or the napDNAbp domain, and the DNA repair protein. In some embodiments, a linker is present between the napDNAbp domain and the first UBP domain. In some embodiments, the “]-[” used in the general architecture above indicates the presence of an optional linker. In some embodiments, the cytidine deaminase and the napDNAbp domain, the cytidine deaminase and the first UBP domain, the cytidine deaminase domain and the DNA repair protein, and/or the napDNAbp domain and the DNA repair protein are fused via any of the linkers provided herein, such as any of the linkers provided below in the section entitled “Linkers”. In some embodiments, cytidine deaminase and the napDNAbp domain, the cytidine deaminase and the first UBP domain, the cytidine deaminase domain and the DNA repair protein, and/or the napDNAbp domain and the DNA repair protein are fused via a linker that comprises between 1 and 200 amino acids. In some embodiments, the cytidine deaminase and the napDNAbp domain, the cytidine deaminase and the first UBP domain, the cytidine deaminase domain and the DNA repair protein, and/or the napDNAbp domain and the DNA repair protein are fused via a linker that comprises from 1 to 5, 1 to 10, 1 to 20, 1 to 30, 1 to 40, 1 to 50, 1 to 60, 1 to 80, 1 to 100, 1 to 150, 1 to 200, 5 to 10, 5 to 20, 5 to 30, 5 to 40, 5 to 60, 5 to 80, 5 to 100, 5 to 150, 5 to 200, 10 to 20, 10 to 30, 10 to 40, 10 to 50, 10 to 60, 10 to 80, 10 to 100, 10 to 150, 10 to 200, 20 to 30, 20 to 40, 20 to 50, 20 to 60, 20 to 80, 20 to 100, 20 to 150, 20 to 200, 30 to 40, 30 to 50, 30 to 60, 30 to 80, 30 to 100, 30 to 150, 30 to 200, 40 to 50, 40 to 60, 40 to 80, 40 to 100, 40 to 150, 40 to 200, 50 to 60, 50 to 80, 50 to 100, 50 to 150, 50 to 200, 60 to 80, 60 to 100, 60 to 150, 60 to 200, 80 to 100, 80 to 150, 80 to 200, 100 to 150, 100 to 200, or 150 to 200 amino acids in length. In some embodiments, cytidine deaminase and the napDNAbp domain, the cytidine deaminase and the first UBP domain, the cytidine deaminase domain and the DNA repair protein, and/or the napDNAbp domain and the DNA repair protein are fused via a linker that comprises 4, 16, 24, 32, 60, 91, or 104 amino acids in length. In some embodiments, the cytidine deaminase and the napDNAbp domain, the cytidine deaminase and the first UBP domain, the cytidine deaminase domain and the DNA repair protein, and/or the napDNAbp domain and the DNA repair protein are fused via a linker that comprises the amino acid sequence of SGSETPGTSESATPES (SEQ ID NO: 102), SGGS (SEQ ID NO: 103), SGGSSGSETPGTSESATPESSGGS (SEQ ID NO: 107), SGGSSGGSSGSETPGTSESATPESSGGSSGGS (SEQ ID NO: 108), SGGSSGGSSGSETPGTSESATPESAGSYPYDVPDYAGSAAPAAKKKKLDGSGSGGSS GGS (SEQ ID NO: 441), GGSGGSPGSPAGSPTSTEEGTSESATPESGPGTSTEPSEGSAPGSPAGSPTSTEEGTSTE PSEGSAPGTSTEPSEGSAPGTSESATPESGPGSEPATSGGSGGS (SEQ ID NO: 109), or SGGSGGSGGS (SEQ ID NO: 120). In some embodiments, cytidine deaminase and the napDNAbp domain, the cytidine deaminase and the first UBP domain, the cytidine deaminase domain and the DNA repair protein, and/or the napDNAbp domain and the DNA repair protein are fused via a linker comprising the amino acid sequence SGSETPGTSESATPES (SEQ ID NO: 102), which may also be referred to as the XTEN linker.

### Nuclear Localization Sequences (NLS)

[0397] In some embodiments, any of the fusion proteins provided herein further comprise one or more nuclear targeting sequences, for example, a nuclear localization sequence (NLS).

[0398] In some embodiments, a NLS comprises an amino acid sequence that facilitates the importation of a protein, that comprises an NLS, into the cell nucleus (e.g., by nuclear transport). In some embodiments, the NLS is a bipartite NLS (BPNLS). Bipartite NLSs are separated by a relatively short spacer sequence (e.g., from 2-20 amino acids, from 5-15 amino acids, or from 8-12 amino acids).

[0399] In some embodiments, any of the fusion proteins provided herein further comprise a nuclear localization sequence (NLS). In some embodiments, the NLS is fused to the N-terminus of the fusion protein. In some embodiments, the NLS is fused to the C-terminus of the fusion protein. In some embodiments, the NLS is fused to the N-terminus of the napDNAbp domain. In some embodiments, the NLS is fused to the C-terminus of the napDNAbp domain. In some embodiments, the NLS is fused to the N-terminus of the cytidine deaminase domain. In some embodiments, the NLS is fused to the C-terminus of the cytidine deaminase domain.

[0400] In some embodiments, the NLS is fused to the N-terminus of the first UBP domain or the second UBP domain. In some embodiments, the NLS is fused to the C-terminus of the the first UBP domain or the second UBP domain. In some embodiments, the NLS is fused to the N-terminus of the DNA repair protein. In some embodiments, the NLS is fused to the C-terminus of the DNA repair protein. In some embodiments, the NLS is fused to the C-terminus of the second DNA repair protein.

[0401] In some embodiments, the NLS is fused to the fusion protein via one or more linkers. In some embodiments, the NLS is fused to the fusion protein without a linker. In some embodiments, the NLS comprises an amino acid sequence of any one of the NLS sequences provided or referenced herein. In some embodiments, the NLS comprises an amino acid sequence as set forth in SEQ ID NO: 41 or SEQ ID NO: 42. Additional nuclear localization sequences are known in the art and would be apparent to the skilled artisan. For example, NLS sequences are described in Plank et al., PCT/EP2000/011690, the contents of which are incorporated herein by reference for their disclosure of exemplary nuclear localization sequences. In some embodiments, a NLS comprises the amino acid sequence

(SEQ ID NO: 41)
PKKKRKV,
(SEQ ID NO: 42)
MDSLLMNRRKFLYQFKNVRWAKGRRETYLC,
(SEQ ID NO: 43)
KRTADGSEFESPKKKRKV,
(SEQ ID NO: 44)
KRGINDRNFWRGENGRKTR,
(SEQ ID NO: 45)
KKTGGPIYRRVDGKWRR,
(SEQ ID NO: 46)
RRELILYDKEEIRRIWR,
(SEQ ID NO: 47)
AVSRKRKA,
or
(SEQ ID NO: 440)
KRTADGSEFEPKKKRKV.

[0402] Exemplary fusion proteins of the disclosure comprising one or more NLSs may comprise one of the following structures:
[0403] NH₂-[BPNLS]-[second UBP domain]-[cytidine deaminase domain]-[first UBP domain]-[napDNAbp domain]-[BPNLS]-COOH;
[0404] NH₂-[BPNLS]-[second UBP domain]-[cytidine deaminase domain]-[first UBP domain]-[napDNAbp domain]-[DNA repair protein]-[BPNLS]-COOH;
[0405] NH₂-[BPNLS]-[DNA repair protein]-[cytidine deaminase domain]-[first UBP domain]-[napDNAbp domain]-[BPNLS]-COOH;
[0406] NH₂-[BPNLS]-[second UBP domain]-[cytidine deaminase domain]-[first UBP domain]-[napDNAbp domain]-[third UBP domain]-[BPNLS]-COOH;
[0407] NH₂-[BPNLS]-[DNA repair protein]-[cytidine deaminase domain]-[first UBP domain]-[napDNAbp domain]-[second UBP domain]-[BPNLS]-COOH; and
[0408] NH₂-[BPNLS]-[DNA repair protein]-[cytidine deaminase domain]-[first UBP domain]-[napDNAbp domain]-[second DNA repair protein]-[BPNLS]-COOH;
   wherein each instance of “]-[” comprises an optional linker.

### Linkers

[0409] In certain embodiments, linkers may be used to link any of the proteins or protein domains described herein. The linker may be as simple as a covalent bond, or it may be a polymeric linker many atoms in length. In certain embodiments, the linker is a polypeptide or based on amino acids. In other embodiments, the linker is not peptide-like. In certain embodiments, the linker is a covalent bond (e.g., a carbon-carbon bond, disulfide bond, carbon-heteroatom bond, etc.). In certain embodiments, the linker is a carbon-nitrogen bond of an amide linkage. In certain embodiments, the linker is a cyclic or acyclic, substituted or unsubstituted, branched or unbranched aliphatic or heteroaliphatic linker. In certain embodiments, the linker is polymeric (e.g., polyethylene, polyethylene glycol, polyamide, polyester, etc.). In certain embodiments, the linker comprises a monomer, dimer, or polymer of aminoalkanoic acid. In certain embodiments, the linker comprises an aminoalkanoic acid (e.g., glycine, ethanoic acid, alanine, beta-alanine, 3-aminopropanoic acid, 4-aminobutanoic acid, 5-pentanoic acid, etc.). In certain embodiments, the linker comprises a monomer, dimer, or polymer of aminohexanoic acid (Ahx). In certain embodiments, the linker is based on a carbocyclic moiety (e.g., cyclopentane, cyclohexane). In other embodiments, the linker comprises a polyethylene glycol moiety (PEG). In other embodiments, the linker comprises amino acids. In certain embodiments, the linker comprises a peptide. In certain embodiments, the linker comprises an aryl or heteroaryl moiety. In certain embodiments, the linker is based on a phenyl ring. The linker may include functionalized moieties to facilitate attachment of a nucleophile (e.g., thiol, amino) from the peptide to the linker. Any electrophile may be used as part of the linker. Exemplary electrophiles include, but are not limited to, activated esters, activated amides, Michael acceptors, alkyl halides, aryl halides, acyl halides, and isothiocyanates.

[0410] In some embodiments, the linker is an amino acid or a plurality of amino acids (e.g., a peptide or protein). In some embodiments, the linker is a bond (e.g., a covalent bond), an organic molecule, group, polymer, or chemical moiety. In some embodiments, the linker is 5-100 amino acids in length, for example, 5, 6, 7, 8, 9, 10, 11, 12, 13, 14, 15, 16, 17, 18, 19, 20, 21, 22, 23, 24, 25, 26, 27, 28, 29, 30, 30-35, 35-40, 40-45, 45-50, 50-60, 60-70, 70-80, 80-90, 90-100, 100-110, 110-120, 120-130, 130-140, 140-150, or 150-200 amino acids in length. Longer or shorter linkers are also contemplated. In some embodiments, a linker comprises the amino acid sequence SGSETPGTSESATPES (SEQ ID NO: 102), which may also be referred to as the XTEN linker. In some embodiments, a linker comprises the amino acid sequence SGGS (SEQ ID NO: 103). In some embodiments, a linker comprises (SGGS)ₙ (SEQ ID NO: 103), (GGGS)ₙ (SEQ ID NO: 104), (GGGGS)ₙ (SEQ ID NO: 105), (G)ₙ(SEQ ID NO: 121), (EAAAK)ₙ (SEQ ID NO: 106), (GGS)ₙ(SEQ ID NO: 122), SGSETPGTSESATPES (SEQ ID NO: 102), SGGSGGSGGS (SEQ ID NO: 120), or (XP)ₙ motif (SEQ ID NO: 123), or a combination of any of these, wherein n is independently an integer between 1 and 30, and wherein X is any amino acid. In some embodiments, n is 1, 2, 3, 4, 5, 6, 7, 8, 9, 10, 11, 12, 13, 14, or 15. In some embodiments, a linker comprises SGSETPGTSESATPES (SEQ ID NO: 102), and SGGS (SEQ ID NO: 103). In some embodiments, a linker comprises SGGSSGSETPGTSESATPESSGGS (SEQ ID NO: 107).

[0411] In some embodiments, a linker comprises SGGSSGGSSGSETPGTSESATPESSGGSSGGS (SEQ ID NO: 108). In some embodiments, the linker comprises SGGSSGGSSGSETPGTSESATPESAGSYPYDVPDYAGSAAPAAKKKKLDGSGSGGSS GGS (SEQ ID NO: 441). In some embodiments, a linker comprises GGSGGSPGSPAGSPTSTEEGTSESATPESGPGTSTEPSEGSAPGSPAGSPTSTEEGTSTE PSEGSAPGTSTEPSEGSAPGTSESATPESGPGSEPATSGGSGGS (SEQ ID NO: 109). In some embodiments, a linker comprises SGGSGGSGGS (SEQ ID NO: 120).

[0412] In some embodiments, the linker is 32 amino acids in length (e.g., the linker consists of SEQ ID NO: 108). In some embodiments, the linker is 60 amino acids in length (e.g., the linker consists of SEQ ID NO: 441).

### Guide Nucleic Acids

[0413] Some aspects of this disclosure provide complexes comprising any of the fusion proteins provided herein, and a guide nucleic acid bound to napDNAbp of the fusion protein. Some aspects of this disclosure provide complexes comprising any of the fusion proteins provided herein, and a guide RNA bound to a Cas9 domain (e.g., a dCas9, a nuclease active Cas9, or a Cas9 nickase) of fusion protein.

[0414] In various embodiments, the present disclosure further provides guide RNAs for use in accordance with the disclosed methods of editing. The disclosure provides guide RNAs that are designed to recognize target sequences. Such gRNAs may be designed to have guide sequences (or “spacers”) having complementarity to a protospacer within the target sequence.

[0415] Guide RNAs are also provided for use with one or more of the disclosed fusion proteins, e.g., in the disclosed methods of editing a nucleic acid molecule. Such gRNAs may be designed to have guide sequences having complementarity to a protospacer within a target sequence to be edited, and to have backbone sequences that interact specifically with the napDNAbp domains of any of the disclosed fusion proteins, such as Cas9 nickase domains of the disclosed fusion proteins.

[0416] In various embodiments, the fusion proteins may be complexed, bound, or otherwise associated with (e.g., via any type of covalent or non-covalent bond) one or more guide sequences. The guide sequence becomes associated or bound to the base editor and directs its localization to a specific target sequence having complementarity to the guide sequence or a portion thereof. The particular design embodiments of a guide sequence will depend upon the nucleotide sequence of a genomic target sequence (i.e., the desired site to be edited) and the type of napDNAbp (e.g., type of Cas9 protein) present in the base editor, among other factors, such as PAM sequence locations, percent G/C content in the target sequence, the degree of microhomology regions, secondary structures, etc.

[0417] In general, a guide sequence is any polynucleotide sequence having sufficient complementarity with a target polynucleotide sequence to hybridize with the target sequence and direct sequence-specific binding of the napDNAbp (e.g., a Cas9 or Cas9 variant) to the target sequence. In some embodiments, the degree of complementarity between a guide sequence and its corresponding target sequence, when optimally aligned using a suitable alignment algorithm, is about or more than about 50%, 60%, 75%, 80%, 85%, 90%, 95%, 97.5%, 99%, or more. Optimal alignment may be determined with the use of any suitable algorithm for aligning sequences, non-limiting example of which include the Smith-Waterman algorithm, the Needleman-Wunsch algorithm, algorithms based on the Burrows-Wheeler Transform (e.g., the Burrows Wheeler Aligner), ClustalW, Clustal X, BLAT, Novoalign (Novocraft Technologies, ELAND (Illumina, San Diego, Calif.), SOAP (available at soap.genomics.org.cn), and Maq (available at maq.sourceforge.net).

[0418] In some embodiments, a guide sequence is about or more than about 5, 10, 11, 12, 13, 14, 15, 16, 17, 18, 19, 20, 21, 22, 23, 24, 25, 26, 27, 28, 29, 30, 35, 40, 45, 50, 75, or more nucleotides in length. In some embodiments, each gRNA comprises a guide sequence of at least 10 contiguous nucleotides (e.g., 10, 11, 12, 13, 14, 15, 16, 17, 18, 19, 20, 21, 22, 23, 24, 25, 26, 27, 28, 29, or 30 contiguous nucleotides) that is complementary to a target sequence (or off-target site).

[0419] In some embodiments, a guide sequence is less than about 75, 50, 45, 40, 35, 30, 25, 20, 15, 12, or fewer nucleotides in length. The ability of a guide sequence to direct sequence-specific binding of a base editor to a target sequence may be assessed by any suitable assay. For example, the components of a base editor, including the guide sequence to be tested, may be provided to a host cell having the corresponding target sequence, such as by transfection with vectors encoding the components of a base editor disclosed herein, followed by an assessment of preferential cleavage within the target sequence. Similarly, cleavage of a target polynucleotide sequence may be evaluated in situ by providing the target sequence, components of a base editor, including the guide sequence to be tested and a control guide sequence different from the test guide sequence, and comparing binding or rate of cleavage at the target sequence between the test and control guide sequence reactions. Other assays are possible, and will occur to those skilled in the art.

[0420] A guide sequence may be selected to target Cny target sequence. In some embodiments, the target sequence is a sequence within a genome of a cell. Exemplary target sequences include those that are unique in the target genome.

[0421] In some embodiments, a guide sequence is selected to reduce the degree of secondary structure within the guide sequence. Secondary structure may be determined by any suitable polynucleotide folding algorithm. Some programs are based on calculating the minimal Gibbs free energy. An example of one such algorithm is mFold, as described by Zuker & Stiegler (Nucleic Acids Res. 9 (1981), 133-148). Another example folding algorithm is the online webserver RNAfold, developed at Institute for Theoretical Chemistry at the University of Vienna, using the centroid structure prediction algorithm (see, e.g., A. R. Gruber et al., 2008, Cell 106(1): 23-24; and P A Carr & G M Church, 2009, Nature Biotechnology 27(12): 1151-62). Additional algorithms may be found in Chuai, G. et al., DeepCRISPR: optimized CRISPR guide RNA design by deep learning, Genome Biol. 19:80 (2018), and U.S. Application Ser. No. 61/836,080 and U.S. Pat. No. 8,871,445, issued Oct. 28, 2014, the entireties of each of which are incorporated herein by reference.

[0422] The guide sequence of the gRNA is linked to a tracr mate (also known as a “backbone”) sequence which in turn hybridizes to a tracr sequence. A tracr mate sequence includes any sequence that has sufficient complementarity with a tracr sequence to promote one or more of: (1) excision of a guide sequence flanked by tracr mate sequences in a cell containing the corresponding tracr sequence; and (2) formation of a complex at a target sequence, wherein the complex comprises the tracr mate sequence hybridized to the tracr sequence. In general, degree of complementarity is with reference to the optimal alignment of the tracr mate sequence and tracr sequence, along the length of the shorter of the two sequences. Optimal alignment may be determined by any suitable alignment algorithm, and may further account for secondary structures, such as self-complementarity within either the tracr sequence or tracr mate sequence. In some embodiments, the degree of complementarity between the tracr sequence and tracr mate sequence along the length of the shorter of the two when optimally aligned is about or more than about 25%, 30%, 40%, 50%, 60%, 70%, 80%, 90%, 95%, 97.5%, 99%, or higher. In some embodiments, the tracr sequence is about or more than about 5, 6, 7, 8, 9, 10, 11, 12, 13, 14, 15, 16, 17, 18, 19, 20, 25, 30, 40, 50, or more nucleotides in length. In some embodiments, the tracr sequence and tracr mate sequence are contained within a single transcript, such that hybridization between the two produces a transcript having a secondary structure, such as a hairpin. Preferred loop forming sequences for use in hairpin structures are four nucleotides in length, and most preferably have the sequence GAAA. However, longer or shorter loop sequences may be used, as may alternative sequences. The sequences preferably include a nucleotide triplet (for example, AAA), and an additional nucleotide (for example C or G). Examples of loop forming sequences include CAAA and AAAG. In an embodiment of the invention, the transcript or transcribed polynucleotide sequence has at least two or more hairpins. In certain embodiments, the transcript has two, three, four or five hairpins. In a further embodiment of the invention, the transcript has at most five hairpins. In some embodiments, the single transcript further includes a transcription termination sequence; preferably this is a polyT sequence, for example six T nucleotides.

[0423] Non-limiting examples of single (DNA) polynucleotides comprising a guide sequence, a tracr mate sequence, and a tracr sequence are as follows (listed 5′ to 3′), where “N” represents a base of a guide sequence, the first block of lower case letters represent the tracr mate sequence, and the second block of lower case letters represent the tracr sequence, and the final poly-T sequence (6 Ts) represents the transcriptional terminator:
[0424] (1) NNNNNNNNgtttttgtactctcaagatttaGAAAtaaatcttgcagaagctacaaagataaggctt catgccgaaatcaacaccctgtcattttatggcagggtgttttcgttatttaaTTTTTT (SEQ ID NO: 216);
[0425] (2) NNNNNNNNNNNNNNNNNNgtttttgtactctcaGAAAtgcagaagctacaaagataaggcttcatgccgaaatca acaccctgtcattttatggcagggtgttttcgttatttaaTTTTTT (SEQ ID NO: 217);
[0426] (3) NNNNNNNNNNNNNNNNNNNNgtttttgtactctcaGAAAtgcagaagctacaaagataaggcttcatgccgaa atcaacaccctgtcattttatggcagggtgtTTTTT (SEQ ID NO: 218);
[0427] (4) NNNNNNNNNNNNNNNNNNNNgttttagagctaGAAAtagcaagttaaaataaggctagtccgttatcaacttg aaaaagtggcaccgagtcggtgcTTTTTT (SEQ ID NO: 219);
[0428] (5) NNNNNNNNNNNNNNNNNNNgttttagagctaGAAATAGcaagttaaaataaggctagtccgttatcaacttga aaaagtgTTTTTTT (SEQ ID NO: 220); and
[0429] (6) NNNNNNNNNNNNNNNNNNNNgttttagagctagAAATAGcaagttaaaataaggctagtccgttatcaTT TTTTTT (SEQ ID NO: 221). In some embodiments, sequences (1) to (3) are used in combination with Cas9 from S. Thermophiles CRISPR1. In some embodiments, sequences (4) to (6) are used in combination with Cas9 from S. pyogenes. In some embodiments, the tracr sequence is a separate transcript from a transcript comprising the tracr mate sequence.

[0430] In some embodiments, the guide RNAs for use in accordance with the disclosed methods of editing comprise synthetic single guide RNAs (sgRNAs) containing modified ribonucleotides. In some embodiments, the guide RNAs contain modifications such as 2′-O-methylated nucleotides and phosphorothioate linkages. In some embodiments, the guide RNAs contain 2′-O-methyl modifications in the first three and last three nucleotides, and phosphorothioate bonds between the first three and last three nucleotides. Exemplary modified synthetic sgRNAs are disclosed in Hendel A. et al., Nat. Biotechnol. 33, 985-989 (2015), herein incorporated by reference.

[0431] In some embodiments, the guide RNAs for use in accordance with the disclosed methods of editing comprise a backbone structure that is recognized by an S. pyogenes Cas9 protein or domain, such as an SpCas9 domain of the disclosed fusion proteins. The backbone structure recognized by an SpCas9 protein may comprise the sequence 5′-[guide sequence]-guuuuagagcuagaaauagcaaguuaaaauaaggcuaguccguuaucaacuugaaaaaguggcaccgagucggugcuuu uu-3′ (SEQ ID NO: 119), wherein the guide sequence comprises a sequence that is complementary to the protospacer of the target sequence. See U.S. Publication No. 2015/0166981, published Jun. 18, 2015, the disclosure of which is incorporated by reference herein. The guide sequence is typically 20 nucleotides long.

[0432] In other embodiments, the guide RNAs for use in accordance with the disclosed methods of editing comprise a backbone structure that is recognized by an S. aureus Cas9 protein. The backbone structure recognized by an SaCas9 protein may comprise the sequence 5′-[guide sequence]-guuuuaguacucuguaaugaaaauuacagaaucuacuaaaacaaggcaaaaugccguguuuaucucgucaacuuguugg cgagauuuuuuu-3′ (SEQ ID NO: 222).

[0433] In other embodiments, the guide RNAs for use in accordance with the disclosed methods of editing comprise a backbone structure that is recognized by an Lachnospiraceae bacterium Cas12a protein. The backbone structure recognized by an LbCas12a protein may comprise the sequence 5′-[guide sequence]-uaauuucuacuaaguguagau-3′ (SEQ ID NO: 445).

[0434] In other embodiments, the guide RNAs for use in accordance with the disclosed methods of editing comprise a backbone structure that is recognized by an Acidaminococcus sp. BV3L6 Cas12a protein. The backbone structure recognized by an AsCas12a protein may comprise the sequence 5′-[guide sequence]-uaauuucuacucuuguagau-3′ (SEQ ID NO: 446).

[0435] The sequences of suitable guide RNAs for targeting the disclosed ABEs to specific genomic target sites will be apparent to those of skill in the art based on the present disclosure. Such suitable guide RNA sequences typically comprise guide sequences that are complementary to a nucleic sequence within 50 nucleotides upstream or downstream of the target nucleobase pair to be edited. Some exemplary guide RNA sequences suitable for targeting any of the provided ABEs to specific target sequences are provided herein. Additional guide sequences are are well known in the art and may be used with the fusion proteins described herein. Additional exemplary guide sequences are disclosed in, for example, Jinek M., et al., Science 337:816-821(2012); Mali P, Esvelt K M & Church G M (2013) Cas9 as a versatile tool for engineering biology, Nature Methods, 10, 957-963; Li J F et al., (2013) Multiplex and homologous recombination-mediated genome editing in Arabidopsis and Nicotiana benthamiana using guide RNA and Cas9, Nature Biotechnology, 31, 688-691; Hwang, W. Y. et al., Efficient genome editing in zebrafish using a CRISPR-Cas system, Nature Biotechnology 31, 227-229 (2013); Cong L et al., (2013) Multiplex genome engineering using CRIPSR/Cas systems, Science, 339, 819-823; Cho S W et al., (2013) Targeted genome engineering in human cells with the Cas9 RNA-guided endonuclease, Nature Biotechnology, 31, 230-232; Jinek, M. et al., RNA-programmed genome editing in human cells, eLife 2, e00471 (2013); Dicarlo, J. E. et al., Genome engineering in Saccharomyces cerevisiae using CRISPR-Cas systems. Nucleic Acid Res. (2013); Briner A E et al., (2014) Guide RNA functional modules direct Cas9 activity and orthogonality, Mol Cell, 56, 333-339, the entire contents of each of which are incorporated herein by reference.

[0436] In some embodiments, the 3′ end of the target sequence is immediately adjacent to a canonical PAM sequence (NGG). In some embodiments, the guide nucleic acid (e.g., guide RNA) is complementary to a sequence associated with a disease or disorder. In some embodiments, the guide nucleic acid (e.g., guide RNA) is complementary to a sequence associated with a disease or disorder having a mutation in a gene associated with any of the diseases or disorders provided herein. In some embodiments, the guide nucleic acid (e.g., guide RNA) is complementary to any of the genes associated with a disease or disorder as provided herein.

### Vectors

[0437] Several aspects of the making and using the fusion proteins of the disclosure relate to vector systems comprising one or more vectors encoding the fusion proteins. Vectors may be designed to clone and/or express the fusion proteins of the disclosure. Vectors may also be designed to transfect the fusion proteins of the disclosure into one or more cells, e.g., a target diseased eukaryotic cell for treatment with the base editor systems and methods disclosed herein.

[0438] Vectors may be designed for expression of base editor transcripts (e.g. nucleic acid transcripts, proteins, or enzymes) in prokaryotic or eukaryotic cells. For example, base editor transcripts may be expressed in bacterial cells such as Escherichia coli, insect cells (using baculovirus expression vectors), yeast cells, plant cells, or mammalian cells. Suitable host cells are discussed further in Goeddel, Gene Expression Technology: Methods In Enzymology 185, Academic Press. San Diego, Calif. (1990). Alternatively, expression vectors encoding one or more fusion proteins described herein may be transcribed and translated in vitro, for example using T7 promoter regulatory sequences and T7 polymerase. Vectors encoding the fusion proteins provided herein may comprise any of the DNA plasmids identified at the Addgene webpage. Exemplary vectors include vectors encoding the the POLD2-rAPOBEC1-UdgX-nCas9-UdgX; UdgX-EE-UdgX-nCas9-UdgX, and UdgX-Anc689-UdgX-nCas9-RBMX base editing fusion proteins.

[0439] Vectors may be introduced and propagated in a prokaryotic cells. In some embodiments, a prokaryote is used to amplify copies of a vector to be introduced into a eukaryotic cell or as an intermediate vector in the production of a vector to be introduced into a eukaryotic cell (e.g., amplifying a plasmid as part of a viral vector packaging system). In some embodiments, a prokaryote is used to amplify copies of a vector and express one or more nucleic acids, such as to provide a source of one or more proteins for delivery to a host cell or host organism. Expression of proteins in prokaryotes is most often carried out in Escherichia coli with vectors containing constitutive or inducible promoters directing the expression of either fusion or non-fusion proteins.

[0440] Fusion expression vectors also may be used to express the fusion proteins of the disclosure. Such vectors generally add a number of amino acids to a protein encoded therein, such as to the amino terminus of the recombinant protein. Such fusion vectors may serve one or more purposes, such as: (i) to increase expression of recombinant protein; (ii) to increase the solubility of the recombinant protein; and (iii) to aid in the purification of the recombinant protein by acting as a ligand in affinity purification. Often, in fusion expression vectors, a proteolytic cleavage site is introduced at the junction of the fusion moiety and the recombinant protein to enable separation of the recombinant protein from the fusion moiety subsequent to purification of the base editor. Such enzymes, and their cognate recognition sequences, include Factor Xa, thrombin and enterokinase. Example fusion expression vectors include pGEX (Pharmacia Biotech Inc; Smith and Johnson, 1988. Gene 67: 31-40), pMAL (New England Biolabs, Beverly, Mass.) and pRIT5 (Pharmacia, Piscataway, N.J.) that fuse glutathione S-transferase (GST), maltose E binding protein, or protein A, respectively, to the target recombinant protein.

[0441] Examples of suitable inducible non-fusion E. coli expression vectors include pTrc (Amrann et al., (1988) Gene 69:301-315) and pET 11d (Studier et al., GENE EXPRESSION TECHNOLOGY: METHODS IN ENZYMOLOGY 185, Academic Press, San Diego, Calif. (1990) 60-89).

[0442] In some embodiments, a vector drives protein expression in insect cells using baculovirus expression vectors. Baculovirus vectors available for expression of proteins in cultured insect cells (e.g., Sf9 cells) include the pAc series (Smith, et al., 1983. Mol. Cell. Biol. 3: 2156-2165) and the pVL series (Lucklow and Summers, 1989. Virology 170: 31-39).

[0443] In some embodiments, a vector is capable of driving expression of one or more sequences in mammalian cells using a mammalian expression vector. Examples of mammalian expression vectors include pCDM8 (Seed, 1987. Nature 329: 840) and pMT2PC (Kaufman, et al., 1987. EMBO J. 6: 187-195). When used in mammalian cells, the expression vector's control functions are typically provided by one or more regulatory elements. For example, commonly used promoters are derived from polyoma, adenovirus 2, cytomegalovirus, simian virus 40, and others disclosed herein and known in the art. For other suitable expression systems for both prokaryotic and eukaryotic cells see, e.g., Chapters 16 and 17 of Sambrook, et al., MOLECULAR CLONING: A LABORATORY MANUAL. 2nd ed., Cold Spring Harbor Laboratory, Cold Spring Harbor Laboratory Press, Cold Spring Harbor, N.Y., 1989.

[0444] In some embodiments, the recombinant mammalian expression vector is capable of directing expression of the nucleic acid preferentially in a particular cell type (e.g., tissue-specific regulatory elements are used to express the nucleic acid). Tissue-specific regulatory elements are known in the art. Non-limiting examples of suitable tissue-specific promoters include the albumin promoter (liver-specific; Pinkert, et al., 1987. Genes Dev. 1: 268-277), lymphoid-specific promoters (Calame and Eaton, 1988. Adv. Immunol. 43: 235-275), in particular promoters of T cell receptors (Winoto and Baltimore, 1989. EMBO J. 8: 729-733) and immunoglobulins (Baneiji, et al., 1983. Cell 33: 729-740; Queen and Baltimore, 1983. Cell 33: 741-748), neuron-specific promoters (e.g., the neurofilament promoter; Byrne and Ruddle, 1989. Proc. Natl. Acad. Sci. USA 86: 5473-5477), pancreas-specific promoters (Edlund, et al., 1985. Science 230: 912-916), and mammary gland-specific promoters (e.g., milk whey promoter, U.S. Pat. No. 4,873,316 and European Application Publication No. 264,166). Developmentally-regulated promoters are also encompassed, e.g., the murine hox promoters (Kessel and Gruss, 1990. Science 249: 374-379) and the a-fetoprotein promoter (Campes and Tilghman, 1989. Genes Dev. 3: 537-546).

[0445] Eukaryotic Cell Systems for Determining Off-Target Effects of Fusion proteins

[0446] In some aspects, eukaryotic cell assays and systems for measuring off-target effects (e.g., off-target editing frequencies) of an fusion protein are provided. These systems may be used in accordance with the disclosed methods. These systems are referred to in the Examples as an “orthogonal R-loop assay.” Systems for determining the off-target editing frequency of a base editor may comprise one or more eukaryotic cells each comprising i) a first nucleic acid molecule encoding a base editor comprising a napDNAbp domain; (ii) a second nucleic acid molecule encoding a first guide RNA that is engineered to bind to the napDNAbp domain of the base editor, wherein the first guide RNA comprises a first sequence of at least 10 contiguous nucleotides that is complementary to a target sequence; (iii) a third nucleic acid molecule encoding a nuclease inactive napDNAbp protein; and (iv) a fourth nucleic acid molecule encoding a second gRNA that is engineered to bind to the nuclease inactive napDNAbp protein, wherein the second guide RNA comprises a second sequence of at least 10 contiguous nucleotides that is complementary to a third sequence, whereby the first complex and second complex generate two or more R-loops, and wherein the third sequence has about 60% or less sequence identity to the target sequence. Exemplary eukaryotic cell assays and systems for measuring off-target effects of the disclosed fusion proteins are disclosed in and International Application No. PCT/US2020/624628, filed Nov. 25, 2020, incorporate herein by reference.

[0447] The disclosed systems may further comprise a third, fourth, fifth, and/or sixth complex, wherein each of the third, fourth, fifth, and/or sixth complexes comprises (v) a second nuclease inactive napDNAbp protein, and (vi) a third guide RNA that is engineered to bind to the second nuclease inactive napDNAbp protein, wherein the third guide RNA comprises a fourth sequence of at least 10 contiguous nucleotides that is complementary to the third sequence. These complexes may be identical or essentially identical to each other, in that they are associated with identical or nearly identical gRNAs that have complementarity to the same off-target sequence. Any one of these complexes may be distinct or essentially identical to the second complex. The second and third guide RNA may share at least 95%, 98%, 98.5%, or 100% sequence identity, e.g., in the backbone of the guide RNA sequence. In certain embodiments, the second and third guide RNA share 100% identity or are the same. Likewise, the first nuclease inactive napDNAbp protein and the second nuclease inactive napDNAbp may be the same.

[0448] In some embodiments, any of the the nuclease inactive napDNAbp proteins of the described systems may be a dead Cas9 (dCas9) protein. Accordingly, in some embodiments, the second complex comprises a first dCas9 protein, and the third and subsequent complexes comprise a second dCas9 protein. In some embodiments, the nuclease inactive napDNAbp protein of any of the described complexes is a dead Cas9 protein from S. aureus. In some embodiments, the nuclease inactive napDNAbp protein is a dead Cas9 protein from S. pyogenes.

[0449] In some embodiments, the eukaryotic cells of the disclosed systems comprise mammalian cells. The eukaryotic cells may comprise human cells, e.g. HEK293T cells.

[0450] In some embodiments of these methods, transformed eukaryotic cells are sequenced to validate that mutations arise from cytosine-to-guanine conversions. This sequencing step may be achieved by Sanger sequencing, high-throughput sequencing, whole genome sequencing, and/or other sequencing methods known in the art.

### Methods of Using Fusion Proteins

[0451] Some aspects of this disclosure provide methods of using any of the fusion proteins (e.g., fusion proteins) provided herein, or complexes comprising a guide nucleic acid (e.g., gRNA) and a fusion protein (e.g., base editor) provided herein. For example, some aspects of this disclosure provide methods comprising contacting a DNA, or RNA molecule with any of the fusion proteins or fusion proteins provided herein, and with at least one guide nucleic acid (e.g., guide RNA), wherein the guide nucleic acid, (e.g., guide RNA) is about 15-100 nucleotides long and comprises a sequence of at least 10 contiguous nucleotides that is complementary to a target sequence. In some embodiments, the 3′ end of the target sequence is immediately adjacent to a canonical spCas9 PAM sequence (NGG). In some embodiments, the 3′ end of the target sequence is not immediately adjacent to a spCas9 canonical PAM sequence (NGG). In some embodiments, the 3′ end of the target sequence is immediately adjacent to an AGC, GAG, TTT, GTG, or CAA sequence.

[0452] In some embodiments, the target DNA sequence comprises a sequence associated with a disease or disorder. In some embodiments, the target DNA sequence comprises a point mutation associated with a disease or disorder. In some embodiments, the activity of the fusion protein (e.g., comprising a napDNAbp, a cytidine deaminase, and a uracil binding protein UBP), or the complex, results in a correction of the point mutation. In some embodiments, the target DNA sequence comprises a G to C, or C to G point mutation associated with a disease or disorder, and wherein deamination a mutant C base and excision of the resulting uracil results in a sequence that is not associated with a disease or disorder. In some embodiments, the target DNA sequence encodes a protein, and the point mutation is in a codon and results in a change in the amino acid encoded by the mutant codon as compared to the wild-type codon. In some embodiments, the deamination of the mutant C and excision of the resulting uracil results in a change of the amino acid encoded by the mutant codon. In some embodiments, the deamination of the mutant C and excision of the resulting uracil results in the codon encoding the wild-type amino acid. In some embodiments, the contacting is in vivo in a subject.

[0453] Some embodiments provide methods for using the DNA editing fusion proteins provided herein. In some embodiments, the fusion protein is used to introduce a point mutation into a nucleic acid by deaminating a target nucleobase, e.g., a C residue. In some embodiments, the fusion protein is used to deaminate a target C to U, which is then removed to create an abasic site previously occupied by the C residue. In some embodiments, the deamination of the target nucleobase, and a subsequent excision, results in the correction of a genetic defect, e.g., in the correction of a point mutation that leads to a loss of function in a gene product. In some embodiments, the methods provided herein are used to introduce a deactivating point mutation into a gene or allele that encodes a gene product that is associated with a disease or disorder. For example, in some embodiments, methods are provided herein that employ a DNA editing fusion protein to introduce a deactivating point mutation into an oncogene (e.g., in the treatment of a proliferative disease). A deactivating mutation may, in some embodiments, generate a premature stop codon in a coding sequence, which results in the expression of a truncated gene product, e.g., a truncated protein lacking the function of the full-length protein.

[0454] In some embodiments, the purpose of the methods provided herein is to restore the function of a dysfunctional gene via genome editing. The base editing fusion proteins provided herein can be validated for gene editing-based human therapeutics in vitro, e.g., by correcting a disease-associated mutation in human cell culture. It will be understood by the skilled artisan that the base editing fusion proteins provided herein, e.g., the fusion proteins comprising a nucleic acid programmable DNA binding protein (e.g., Cas9), a cytidine deaminase, and a uracil binding protein can be used to correct any single point C to G or G to C mutation. In the first case, deamination of the mutant C to U, and subsequent excision of the U, corrects the mutation, and in the latter case, deamination of the C to U, and subsequent excision of the U that is base-paired with the mutant G, followed by a round of replication, corrects the mutation.

[0455] The successful correction of point mutations in disease-associated genes and alleles opens up new strategies for gene correction with applications in therapeutics and basic research. Site-specific single-base modification systems like the disclosed fusion proteins comprising a nucleic acid programmable DNA binding protein (napDNAbp), a cytidine deaminase, and a uracil binding protein also have applications in “reverse” gene therapy, where certain gene functions are purposely suppressed or abolished. In these cases, site-specifically mutating residues that lead to inactivating mutations in a protein, or mutations that inhibit function of the protein can be used to abolish or inhibit protein function in vitro, ex vivo, or in vivo.

[0456] The instant disclosure provides methods for the treatment of a subject diagnosed with a disease associated with or caused by a point mutation that can be corrected by a DNA editing fusion protein provided herein. For example, in some embodiments, a method is provided that comprises administering to a subject having such a disease, e.g., a cancer associated with a point mutation as described above, an effective amount of a base editor fusion protein that corrects the point mutation (e.g., a C to G or G to C point mutation) or introduces a deactivating mutation into a disease-associated gene. In some embodiments, the disease is a proliferative disease. In some embodiments, the disease is a genetic disease. In some embodiments, the disease is a neoplastic disease. In some embodiments, the disease is a metabolic disease. In some embodiments, the disease is a lysosomal storage disease. Other diseases that can be treated by correcting a point mutation or introducing a deactivating mutation into a disease-associated gene will be known to those of skill in the art, and the disclosure is not limited in this respect.

[0457] The instant disclosure provides lists of genes comprising pathogenic G to C or C to G mutations. Such pathogenic G to C or C to G mutations may be corrected using the methods and compositions provided herein, for example by mutating the C to a G, and/or the G to a C, thereby restoring gene function.

[0458] In some embodiments, a fusion protein recognizes canonical PAMs and therefore can correct the pathogenic G to C or C to G mutations with canonical PAMs, e.g., NGG, respectively, in the flanking sequences. For example, Cas9 proteins that recognize canonical PAMs comprise an amino acid sequence that is at least 80%, 85%, 90%, 95%, 97%, 98%, or 99% identical to the amino acid sequence of Streptococcus pyogenes Cas9 as provided by SEQ ID NO: 6, or to a fragment thereof comprising the RuvC and HNH domains of SEQ ID NO: 6.

[0459] Any of the fusion protein-gRNA complexes provided herein may be introduced into the cell for multiplexed base editing in any suitable way, either stably or transiently. In some embodiments, a base editor may be transfected into the cell. In some embodiments, the cell may be transduced or transfected with a nucleic acid construct that encodes the base editor. For example, a cell may be transduced (e.g. with a virus encoding a base editor) or transfected (e.g. with a plasmid encoding a base editor) with a nucleic acid that encodes the base editor. Alternatively, a cell may be introduced with the base editor itself. Such transduction may be a stable or transient transduction. In some embodiments, cells expressing a base editing base editor, or comprising a base editor, may be transduced or transfected with one or more gRNA molecules, for example, when the base editor comprises a Cas9 (e.g., nCas9) domain. In some embodiments, a plasmid expressing a base editor may be introduced into cells through electroporation (e.g., using an ATX MaxCyte electroporator), transient transfection (e.g. lipofection) or stable genome integration (e.g., piggybac), viral transduction, or other methods known to those of skill in the art.

[0460] In certain embodiments of the disclosed methods, the constructs that encode the fusion proteins are transfected into the cell separately from the constructs that encode the gRNAs. In certain embodiments, these components are encoded on a single construct and transfected together. In particular embodiments, these single constructs encoding the fusion proteins and gRNAs may be transfected into the cell iteratively, with each iteration associated with a subset of target sequences. In particular embodiments, these single constructs may be transfected into the cell over a period of days. In other embodiments, they may be transfected into the cell over a period of hours. In other embodiments, they may be transected into the cell over a period of weeks.

[0461] In the disclosed methods, target cells may be incubated with the base editor-gRNA complexes for two days, or 48 hours, after transfection to achieve multiplexed base editing. Target cells may be incubated for 30 hours, 40 hours, 54 hours, 60 hours, or 72 hours after transfection. Target cells may be incubated with the base editor-gRNA complexes for four days, five days, seven days, nine days, eleven days, or thirteen days or more after transfection.

[0462] In some aspects, the disclosure provides pharmaceutical compositions comprising a plurality of any of the fusion proteins described herein and a gRNA, wherein at least five of the fusion proteins of the plurality are each bound to a unique gRNA, and a pharmaceutically acceptable excipient.

[0463] In some aspects, the disclosure provides systematic and comprehensive predictive tools (e.g., one or more machine learning models, such as the BE-Hive model) that facilitate the selection of appropriate base editors to achieve any given desired predicted genotype outcome for a given target site through base editing. In another aspect, the predictive tools (e.g., machine learning models) disclosed herein may also be used to discover or identify previously unknown base editor properties (e.g., previously unknown preferences, such as a base editor's preference to make a transversion edit instead of a transition edit), which may facilitate the design of novel base editors with new capabilities. In various aspects, the disclosed machine learning models for selecting an appropriate base editor to achieve a desired genotype outcome may involve the consideration of one or more determinants of base editing, which can include, but are not limited to, the choice of the napDNAbp domain of the base editing system; the choice of the deaminase domain of the base editing system; the choice of the uracil binding protein(s) of the base editing system; the choice of the DNA repair protein of the base editing system; the choice of base editor; the target nucleotide sequence (e.g., guide RNA binding sites); the target genomic location; the transcriptional state of the target genomic location; locus-dependent activity of the choice napDNAbp; cell-type; transcriptional state of DNA repair proteins; and base editor modifications.

[0464] Accordingly, provided herein are methods of using at least one machine learning model to identify at least one fusion protein from among a set of fusion proteins, for use in a base editing system for introducing a desired cytosine-to-guanine edit into a nucleotide sequence, the at least one fusion protein comprising a napDNAbp domain, a cytidine deaminase domain, and at least one uracil binding protein, the method comprising: using software executing on at least one computer hardware processor to perform: obtaining input data indicative of the nucleotide sequence, one or more guide RNAs, and the set of fusion proteins; generating first input features from the input data; applying a first machine learning model to the first input features to obtain first output data indicative, for each fusion protein in the set, of a base editing efficiency at one or multiple locations in the nucleotide sequence, of the base editing system when using the each fusion protein; generating second input features from the input data; applying a second machine learning model to the second input features to obtain second output data indicative, for each fusion protein in the set, of a base editing product purity at one or multiple locations in the nucleotide sequence, by the base editing system when using the each fusion protein; and identifying, using the first output data and the second output data, at least one fusion protein for use in the base editing system for introducing the cytosine to guanine change in the nucleotide sequence. In some embodiments, the methods further comprise applying a third machine learning model to the second input features to obtain third output data indicative, for each fusion protein in the set, of a bystander editing efficiency at one or multiple locations in the nucleotide sequence, by the base editing system when using the each fusion protein.

[0465] In some embodiments, the set of fusion proteins comprises any of the fusion proteins disclosed herein. In some embodiments, the set of fusion proteins comprises any of the fusion proteins disclosed herein and any of the CGBEs disclosed in International Publication No. WO 2018/165629, published Sep. 13, 2018; Kurt, I. C. et al. Nature Biotechnology 39, 41-46 (2020); Zhao, D. et al. Nature Biotechnology 39, 35-40 (2020); and Chen, L. et al., Nature Communications 12 (2021), each of which are incorporated by reference herein. In some embodiments, the set of fusion proteins comprises mini CGBE1, CGBE1, APO1-nCas9-UNG, and APO1-nCas9-XRCC1.

[0466] Accordingly, provided herein are trained CGBE-Hive algorithms that accurately predict CGBE efficiency, C•G-to-G•C editing purity, and bystander editing patterns (R=0.90) to enable consistently pure CGBE editing that outperforms previously described CGBEs. Computational prediction of optimal CGBE-gRNA pairs enables high-purity C-to-G base editing at >4-fold more target sites than can be achieved using any single CGBE variant. Methods of Treatment

[0467] The present disclosure provides methods for the treatment of a subject diagnosed with a disease associated with or caused by a G:C to C:G point mutation that may be corrected by a DNA editing base editor provided herein. For example, in some embodiments, a method is provided that comprises administering to a subject having such a disease, e.g., a cancer associated with a point mutation as described above, an effective amount of an cytosine deaminase base editor that corrects the point mutation or introduces a deactivating mutation into a disease-associated gene. In some embodiments, the disease is a proliferative disease. In some embodiments, the disease is a genetic disease. In some embodiments, the disease is a neoplastic disease. In some embodiments, the disease is a metabolic disease. In some embodiments, the disease is a lysosomal storage disease. Other diseases that may be treated by correcting a point mutation or introducing a deactivating mutation into a disease-associated gene will be known to those of skill in the art, and the disclosure is not limited in this respect.

[0468] In some embodiments, the deamination of the mutant C base and excision of the resulting uracil results in the codon encoding the wild-type amino acid. In some embodiments, the contacting is in vivo in a subject. In some embodiments, the subject has or has been diagnosed with a disease or disorder. In some embodiments, the disease or disorder is a hemoglobinopathy. In some embodiments, the disease or disorder is sickle cell disease. In some embodiments, the disease or disorder is Ehlers-Danlos syndrome, Sotos syndrome, Cornelia de Lange syndrome, Perlmen Syndrome, or a cancer.

[0469] Some embodiments provide methods for using the fusion proteins provided herein. In some embodiments, the fusion proteins are used to introduce a point mutation into a nucleic acid by deaminating a target nucleobase, e.g., a C residue. In some embodiments, the deamination of the target C base and excision of the resulting uracil results in the correction of a genetic defect, e.g., in the correction of a point mutation that leads to a loss of function in a gene product. In some embodiments, the genetic defect is associated with a disease or disorder, e.g., a lysosomal storage disorder or a metabolic disease, such as, for example, type I diabetes. In some embodiments, the methods provided herein are used to introduce a deactivating point mutation into a gene or allele that encodes a gene product that is associated with a disease or disorder. For example, in some embodiments, methods are provided herein that employ a DNA editing base editor to introduce a deactivating point mutation into an oncogene (e.g., in the treatment of a proliferative disease). A deactivating mutation may, in some embodiments, generate a premature stop codon in a coding sequence, which results in the expression of a truncated gene product, e.g., a truncated protein lacking the function of the full-length protein.

[0470] In some embodiments, the purpose of the methods provided herein is to restore the function of a dysfunctional gene via genome editing. The nucleobase editing proteins provided herein can be validated for gene editing-based human therapeutics in vitro, e.g., by correcting a disease-associated mutation in human cell culture. It will be understood by the skilled artisan that the nucleobase editing proteins provided herein, e.g., the fusion proteins comprising a nucleic acid programmable DNA binding protein (e.g., Cas9) and an cytosine deaminase domain may be used to correct any single point C to G mutation.

[0471] The present disclosure provides methods for the treatment of additional diseases or disorders, e.g., diseases or disorders that are associated or caused by a G:C to C:G point mutation that may be corrected by any of the base editors or editing methods disclosed herein. Some such diseases are described herein, and additional suitable diseases that may be treated with the strategies and fusion proteins provided herein will be apparent to those of skill in the art based on the present disclosure. Exemplary suitable diseases and disorders are listed below. Exemplary suitable diseases and disorders include, without limitation: 2-methyl-3-hydroxybutyric aciduria; 3 beta-Hydroxysteroid dehydrogenase deficiency; 3-Methylglutaconic aciduria; 3-Oxo-5 alpha-steroid delta 4-dehydrogenase deficiency; 46, XY sex reversal, type 1, 3, and 5; 5-Oxoprolinase deficiency; 6-pyruvoyl-tetrahydropterin synthase deficiency; Aarskog syndrome; Aase syndrome; Achondrogenesis type 2; Achromatopsia 2 and 7; Acquired long QT syndrome; Acrocallosal syndrome, Schinzel type; Acrocapitofemoral dysplasia; Acrodysostosis 2, with or without hormone resistance; Acroerythrokeratoderma; Acromicric dysplasia; Acth-independent macronodular adrenal hyperplasia 2; Activated PI3K-delta syndrome; Acute intermittent porphyria; deficiency of Acyl-CoA dehydrogenase family, member 9; Adams-Oliver syndrome 5 and 6; Adenine phosphoribosyltransferase deficiency; Adenylate kinase deficiency; hemolytic anemia due to Adenylosuccinate lyase deficiency; Adolescent nephronophthisis; Renal-hepatic-pancreatic dysplasia; Meckel syndrome type 7; Adrenoleukodystrophy; Adult junctional epidermolysis bullosa; Epidermolysis bullosa, junctional, localisata variant; Adult neuronal ceroid lipofuscinosis; Adult neuronal ceroid lipofuscinosis; Adult onset ataxia with oculomotor apraxia; ADULT syndrome; Afibrinogenemia and congenital Afibrinogenemia; autosomal recessive Agammaglobulinemia 2; Age-related macular degeneration 3, 6, 11, and 12; Aicardi Goutieres syndromes 1, 4, and 5; Chilbain lupus 1; Alagille syndromes 1 and 2; Alexander disease; Alkaptonuria; Allan-Herndon-Dudley syndrome; Alopecia universalis congenital; Alpers encephalopathy; Alpha-1-antitrypsin deficiency; autosomal dominant, autosomal recessive, and X-linked recessive Alport syndromes; Alzheimer disease, familial, 3, with spastic paraparesis and apraxia; Alzheimer disease, types, 1, 3, and 4; hypocalcification type and hypomaturation type, IIA1 Amelogenesis imperfecta; Aminoacylase 1 deficiency; Amish infantile epilepsy syndrome; Amyloidogenic transthyretin amyloidosis; Amyloid Cardiomyopathy, Transthyretin-related; Cardiomyopathy; Amyotrophic lateral sclerosis types 1, 6, 15 (with or without frontotemporal dementia), 22 (with or without frontotemporal dementia), and 10; Frontotemporal dementia with TDP43 inclusions, TARDBP-related; Andermann syndrome; Andersen Tawil syndrome; Congenital long QT syndrome; Anemia, nonspherocytic hemolytic, due to G6PD deficiency; Angelman syndrome; Severe neonatal-onset encephalopathy with microcephaly; susceptibility to Autism, X-linked 3; Angiopathy, hereditary, with nephropathy, aneurysms, and muscle cramps; Angiotensin i-converting enzyme, benign serum increase; Aniridia, cerebellar ataxia, and mental retardation; Anonychia; Antithrombin III deficiency; Antley-Bixler syndrome with genital anomalies and disordered steroidogenesis; Aortic aneurysm, familial thoracic 4, 6, and 9; Thoracic aortic aneurysms and aortic dissections; Multisystemic smooth muscle dysfunction syndrome; Moyamoya disease 5; Aplastic anemia; Apparent mineralocorticoid excess; Arginase deficiency; Argininosuccinate lyase deficiency; Aromatase deficiency; Arrhythmogenic right ventricular cardiomyopathy types 5, 8, and 10; Primary familial hypertrophic cardiomyopathy; Arthrogryposis multiplex congenita, distal, X-linked; Arthrogryposis renal dysfunction cholestasis syndrome; Arthrogryposis, renal dysfunction, and cholestasis 2; Asparagine synthetase deficiency; Abnormality of neuronal migration; Ataxia with vitamin E deficiency; Ataxia, sensory, autosomal dominant; Ataxia-telangiectasia syndrome; Hereditary cancer-predisposing syndrome; Atransferrinemia; Atrial fibrillation, familial, 11, 12, 13, and 16; Atrial septal defects 2, 4, and 7 (with or without atrioventricular conduction defects); Atrial standstill 2; Atrioventricular septal defect 4; Atrophia bulborum hereditaria; ATR-X syndrome; Auriculocondylar syndrome 2; Autoimmune disease, multisystem, infantile-onset; Autoimmune lymphoproliferative syndrome, type 1a; Autosomal dominant hypohidrotic ectodermal dysplasia; Autosomal dominant progressive external ophthalmoplegia with mitochondrial DNA deletions 1 and 3; Autosomal dominant torsion dystonia 4; Autosomal recessive centronuclear myopathy; Autosomal recessive congenital ichthyosis 1, 2, 3, 4A, and 4B; Autosomal recessive cutis laxa type IA and 1B; Autosomal recessive hypohidrotic ectodermal dysplasia syndrome; Ectodermal dysplasia 11b; hypohidrotic/hair/tooth type, autosomal recessive; Autosomal recessive hypophosphatemic bone disease; Axenfeld-Rieger syndrome type 3; Bainbridge-Ropers syndrome; Bannayan-Riley-Ruvalcaba syndrome; PTEN hamartoma tumor syndrome; Baraitser-Winter syndromes 1 and 2; Barakat syndrome; Bardet-Biedl syndromes 1, 11, 16, and 19; Bare lymphocyte syndrome type 2, complementation group E; Bartter syndrome antenatal type 2; Bartter syndrome types 3, 3 with hypocalciuria, and 4; Basal ganglia calcification, idiopathic, 4; Beaded hair; Benign familial hematuria; Benign familial neonatal seizures 1 and 2; Seizures, benign familial neonatal, 1, and/or myokymia; Seizures, Early infantile epileptic encephalopathy 7; Benign familial neonatal-infantile seizures; Benign hereditary chorea; Benign scapuloperoneal muscular dystrophy with cardiomyopathy; Bernard-Soulier syndrome, types A1 and A2 (autosomal dominant); Bestrophinopathy, autosomal recessive; beta Thalassemia; Bethlem myopathy and Bethlem myopathy 2; Bietti crystalline corneoretinal dystrophy; Bile acid synthesis defect, congenital, 2; Biotinidase deficiency; Birk Barel mental retardation dysmorphism syndrome; Blepharophimosis, ptosis, and epicanthus inversus; Bloom syndrome; Borjeson-Forssman-Lehmann syndrome; Boucher Neuhauser syndrome; Brachydactyly types A1 and A2; Brachydactyly with hypertension; Brain small vessel disease with hemorrhage; Branched-chain ketoacid dehydrogenase kinase deficiency; Branchiootic syndromes 2 and 3; Breast cancer, early-onset; Breast-ovarian cancer, familial 1, 2, and 4; Brittle cornea syndrome 2; Brody myopathy; Bronchiectasis with or without elevated sweat chloride 3; Brown-Vialetto-Van laere syndrome and Brown-Vialetto-Van Laere syndrome 2; Brugada syndrome; Brugada syndrome 1; Ventricular fibrillation; Paroxysmal familial ventricular fibrillation; Brugada syndrome and Brugada syndrome 4; Long QT syndrome; Sudden cardiac death; Bull eye macular dystrophy; Stargardt disease 4; Cone-rod dystrophy 12; Bullous ichthyosiform erythroderma; Burn-Mckeown syndrome; Candidiasis, familial, 2, 5, 6, and 8; Carbohydrate-deficient glycoprotein syndrome type I and II; Carbonic anhydrase VA deficiency, hyperammonemia due to; Carcinoma of colon; Cardiac arrhythmia; Long QT syndrome, LQT1 subtype; Cardioencephalomyopathy, fatal infantile, due to cytochrome c oxidase deficiency; Cardiofaciocutaneous syndrome; Cardiomyopathy; Danon disease; Hypertrophic cardiomyopathy; Left ventricular noncompaction cardiomyopathy; Carnevale syndrome; Carney complex, type 1; Carnitine acylcarnitine translocase deficiency; Carnitine palmitoyltransferase I, II, II (late onset), and II (infantile) deficiency; Cataract 1, 4, autosomal dominant, autosomal dominant, multiple types, with microcornea, coppock-like, juvenile, with microcornea and glucosuria, and nuclear diffuse nonprogressive; Catecholaminergic polymorphic ventricular tachycardia; Caudal regression syndrome; Cd8 deficiency, familial; Central core disease; Centromeric instability of chromosomes 1,9 and 16 and immunodeficiency; Cerebellar ataxia infantile with progressive external ophthalmoplegi and Cerebellar ataxia, mental retardation, and dysequilibrium syndrome 2; Cerebral amyloid angiopathy, APP-related; Cerebral autosomal dominant and recessive arteriopathy with subcortical infarcts and leukoencephalopathy; Cerebral cavernous malformations 2; Cerebrooculofacioskeletal syndrome 2; Cerebro-oculo-facio-skeletal syndrome; Cerebroretinal microangiopathy with calcifications and cysts; Ceroid lipofuscinosis neuronal 2, 6, 7, and 10; Ch\xc3\xa9diak-Higashi syndrome, Chediak-Higashi syndrome, adult type; Charcot-Marie-Tooth disease types 1B, 2B2, 2C, 2F, 2I, 2U (axonal), 1C (demyelinating), dominant intermediate C, recessive intermediate A, 2A2, 4C, 4D, 4H, IF, IVF, and X; Scapuloperoneal spinal muscular atrophy; Distal spinal muscular atrophy, congenital nonprogressive; Spinal muscular atrophy, distal, autosomal recessive, 5; CHARGE association; Childhood hypophosphatasia; Adult hypophosphatasia; Cholecystitis; Progressive familial intrahepatic cholestasis 3; Cholestasis, intrahepatic, of pregnancy 3; Cholestanol storage disease; Cholesterol monooxygenase (side-chain cleaving) deficiency; Chondrodysplasia Blomstrand type; Chondrodysplasia punctata 1, X-linked recessive and 2 X-linked dominant; CHOPS syndrome; Chronic granulomatous disease, autosomal recessive cytochrome b-positive, types 1 and 2; Chudley-McCullough syndrome; Ciliary dyskinesia, primary, 7, 11, 15, 20 and 22; Citrullinemia type I; Citrullinemia type I and II; Cleidocranial dysostosis; C-like syndrome; Cockayne syndrome type A; Coenzyme Q10 deficiency, primary 1, 4, and 7; Coffin Siris/Intellectual Disability; Coffin-Lowry syndrome; Cohen syndrome; Cold-induced sweating syndrome 1; COLE-CARPENTER SYNDROME 2; Combined cellular and humoral immune defects with granulomas; Combined d-2- and 1-2-hydroxyglutaric aciduria; Combined malonic and methylmalonic aciduria; Combined oxidative phosphorylation deficiencies 1, 3, 4, 12, 15, and 25; Combined partial and complete 17-alpha-hydroxylase/17,20-lyase deficiency; Common variable immunodeficiency 9; Complement component 4, partial deficiency of, due to dysfunctional c1 inhibitor; Complement factor B deficiency; Cone monochromatism; Cone-rod dystrophy 2 and 6; Cone-rod dystrophy amelogenesis imperfecta; Congenital adrenal hyperplasia and Congenital adrenal hypoplasia, X-linked; Congenital amegakaryocytic thrombocytopenia; Congenital aniridia; Congenital central hypoventilation; Hirschsprung disease 3; Congenital contractural arachnodactyly; Congenital contractures of the limbs and face, hypotonia, and developmental delay; Congenital disorder of glycosylation types 1B, 1D, 1G, 1H, 1J, 1K, 1N, 1P, 2C, 2J, 2K, IIm; Congenital dyserythropoietic anemia, type I and II; Congenital ectodermal dysplasia of face; Congenital erythropoietic porphyria; Congenital generalized lipodystrophy type 2; Congenital heart disease, multiple types, 2; Congenital heart disease; Interrupted aortic arch; Congenital lipomatous overgrowth, vascular malformations, and epidermal nevi; Non-small cell lung cancer; Neoplasm of ovary; Cardiac conduction defect, nonspecific; Congenital microvillous atrophy; Congenital muscular dystrophy; Congenital muscular dystrophy due to partial LAMA2 deficiency; Congenital muscular dystrophy-dystroglycanopathy with brain and eye anomalies, types A2, A7, A8, All, and A14; Congenital muscular dystrophy-dystroglycanopathy with mental retardation, types B2, B3, B5, and B15; Congenital muscular dystrophy-dystroglycanopathy without mental retardation, type B5; Congenital muscular hypertrophy-cerebral syndrome; Congenital myasthenic syndrome, acetazolamide-responsive; Congenital myopathy with fiber type disproportion; Congenital ocular coloboma; Congenital stationary night blindness, type 1A, 1B, 1C, 1E, 1F, and 2A; Coproporphyria; Cornea plana 2; Corneal dystrophy, Fuchs endothelial, 4; Corneal endothelial dystrophy type 2; Corneal fragility keratoglobus, blue sclerae and joint hypermobility; Cornelia de Lange syndromes 1 and 5; Coronary artery disease, autosomal dominant 2; Coronary heart disease; Hyperalphalipoproteinemia 2; Cortical dysplasia, complex, with other brain malformations 5 and 6; Cortical malformations, occipital; Corticosteroid-binding globulin deficiency; Corticosterone methyloxidase type 2 deficiency; Costello syndrome; Cowden syndrome 1; Coxa plana; Craniodiaphyseal dysplasia, autosomal dominant; Craniosynostosis 1 and 4; Craniosynostosis and dental anomalies; Creatine deficiency, X-linked; Crouzon syndrome; Cryptophthalmos syndrome; Cryptorchidism, unilateral or bilateral; Cushing symphalangism; Cutaneous malignant melanoma 1; Cutis laxa with osteodystrophy and with severe pulmonary, gastrointestinal, and urinary abnormalities; Cyanosis, transient neonatal and atypical nephropathic; Cystic fibrosis; Cystinuria; Cytochrome c oxidase i deficiency; Cytochrome-c oxidase deficiency; D-2-hydroxyglutaric aciduria 2; Darier disease, segmental; Deafness with labyrinthine aplasia microtia and microdontia (LAMM); Deafness, autosomal dominant 3a, 4, 12, 13, 15, autosomal dominant nonsyndromic sensorineural 17, 20, and 65; Deafness, autosomal recessive 1A, 2, 3, 6, 8, 9, 12, 15, 16, 18b, 22, 28, 31, 44, 49, 63, 77, 86, and 89; Deafness, cochlear, with myopia and intellectual impairment, without vestibular involvement, autosomal dominant, X-linked 2; Deficiency of 2-methylbutyryl-CoA dehydrogenase; Deficiency of 3-hydroxyacyl-CoA dehydrogenase; Deficiency of alpha-mannosidase; Deficiency of aromatic-L-amino-acid decarboxylase; Deficiency of bisphosphoglycerate mutase; Deficiency of butyryl-CoA dehydrogenase; Deficiency of ferroxidase; Deficiency of galactokinase; Deficiency of guanidinoacetate methyltransferase; Deficiency of hyaluronoglucosaminidase; Deficiency of ribose-5-phosphate isomerase; Deficiency of steroid 11-beta-monooxygenase; Deficiency of UDPglucose-hexose-1-phosphate uridylyltransferase; Deficiency of xanthine oxidase; Dejerine-Sottas disease; Charcot-Marie-Tooth disease, types ID and IVF; Dejerine-Sottas syndrome, autosomal dominant; Dendritic cell, monocyte, B lymphocyte, and natural killer lymphocyte deficiency; Desbuquois dysplasia 2; Desbuquois syndrome; DFNA 2 Nonsyndromic Hearing Loss; Diabetes mellitus and insipidus with optic atrophy and deafness; Diabetes mellitus, type 2, and insulin-dependent, 20; Diamond-Blackfan anemia 1, 5, 8, and 10; Diarrhea 3 (secretory sodium, congenital, syndromic) and 5 (with tufting enteropathy, congenital); Dicarboxylic aminoaciduria; Diffuse palmoplantar keratoderma, Bothnian type; Digitorenocerebral syndrome; Dihydropteridine reductase deficiency; Dilated cardiomyopathy 1A, 1AA, 1C, 1G, 1BB, 1DD, 1FF, 1HH, 11, 1KK, 1N, 1S, 1Y, and 3B; Left ventricular noncompaction 3; Disordered steroidogenesis due to cytochrome p450 oxidoreductase deficiency; Distal arthrogryposis type 2B; Distal hereditary motor neuronopathy type 2B; Distal myopathy Markesbery-Griggs type; Distal spinal muscular atrophy, X-linked 3; Distichiasis-lymphedema syndrome; Dominant dystrophic epidermolysis bullosa with absence of skin; Dominant hereditary optic atrophy; Donnai Barrow syndrome; Dopamine beta hydroxylase deficiency; Dopamine receptor d2, reduced brain density of; Dowling-degos disease 4; Doyne honeycomb retinal dystrophy; Malattia leventinese; Duane syndrome type 2; Dubin-Johnson syndrome; Duchenne muscular dystrophy; Becker muscular dystrophy; Dysfibrinogenemia; Dyskeratosis congenita autosomal dominant and autosomal dominant, 3; Dyskeratosis congenita, autosomal recessive, 1, 3, 4, and 5; Dyskeratosis congenita X-linked; Dyskinesia, familial, with facial myokymia; Dysplasminogenemia; Dystonia 2 (torsion, autosomal recessive), 3 (torsion, X-linked), 5 (Dopa-responsive type), 10, 12, 16, 25, 26 (Myoclonic); Seizures, benign familial infantile, 2; Early infantile epileptic encephalopathy 2, 4, 7, 9, 10, 11, 13, and 14; Atypical Rett syndrome; Early T cell progenitor acute lymphoblastic leukemia; Ectodermal dysplasia skin fragility syndrome; Ectodermal dysplasia-syndactyly syndrome 1; Ectopia lentis, isolated autosomal recessive and dominant; Ectrodactyly, ectodermal dysplasia, and cleft lip/palate syndrome 3; Ehlers-Danlos syndrome type 7 (autosomal recessive), classic type, type 2 (progeroid), hydroxylysine-deficient, type 4, type 4 variant, and due to tenascin-X deficiency; Eichsfeld type congenital muscular dystrophy; Endocrine-cerebroosteodysplasia; Enhanced s-cone syndrome; Enlarged vestibular aqueduct syndrome; Enterokinase deficiency; Epidermodysplasia verruciformis; Epidermolysa bullosa simplex and limb girdle muscular dystrophy, simplex with mottled pigmentation, simplex with pyloric atresia, simplex, autosomal recessive, and with pyloric atresia; Epidermolytic palmoplantar keratoderma; Familial febrile seizures 8; Epilepsy, childhood absence 2, 12 (idiopathic generalized, susceptibility to) 5 (nocturnal frontal lobe), nocturnal frontal lobe type 1, partial, with variable foci, progressive myoclonic 3, and X-linked, with variable learning disabilities and behavior disorders; Epileptic encephalopathy, childhood-onset, early infantile, 1, 19, 23, 25, 30, and 32; Epiphyseal dysplasia, multiple, with myopia and conductive deafness; Episodic ataxia type 2; Episodic pain syndrome, familial, 3; Epstein syndrome; Fechtner syndrome; Erythropoietic protoporphyria; Estrogen resistance; Exudative vitreoretinopathy 6; Fabry disease and Fabry disease, cardiac variant; Factor H, VII, X, v and factor viii, combined deficiency of 2, xiii, a subunit, deficiency; Familial adenomatous polyposis 1 and 3; Familial amyloid nephropathy with urticaria and deafness; Familial cold urticarial; Familial aplasia of the vermis; Familial benign pemphigus; Familial cancer of breast; Breast cancer, susceptibility to; Osteosarcoma; Pancreatic cancer 3; Familial cardiomyopathy; Familial cold autoinflammatory syndrome 2; Familial colorectal cancer; Familial exudative vitreoretinopathy, X-linked; Familial hemiplegic migraine types 1 and 2; Familial hypercholesterolemia; Familial hypertrophic cardiomyopathy 1, 2, 3, 4, 7, 10, 23 and 24; Familial hypokalemia-hypomagnesemia; Familial hypoplastic, glomerulocystic kidney; Familial infantile myasthenia; Familial juvenile gout; Familial Mediterranean fever and Familial mediterranean fever, autosomal dominant; Familial porencephaly; Familial Porphyria cutanea tarda; Familial pulmonary capillary hemangiomatosis; Familial renal glucosuria; Familial renal hypouricemia; Familial restrictive cardiomyopathy 1; Familial type 1 and 3 hyperlipoproteinemia; Fanconi anemia, complementation group E, I, N, and O; Fanconi-Bickel syndrome; Favism, susceptibility to; Febrile seizures, familial, 11; Feingold syndrome 1; Fetal hemoglobin quantitative trait locus 1; FG syndrome and FG syndrome 4; Fibrosis of extraocular muscles, congenital, 1, 2, 3a (with or without extraocular involvement), 3b; Fish-eye disease; Fleck corneal dystrophy; Floating-Harbor syndrome; Focal epilepsy with speech disorder with or without mental retardation; Focal segmental glomerulosclerosis 5; Forebrain defects; Frank Ter Haar syndrome; Borrone Di Rocco Crovato syndrome; Frasier syndrome; Wilms tumor 1; Freeman-Sheldon syndrome; Frontometaphyseal dysplasia land 3; Frontotemporal dementia; Frontotemporal dementia and/or amyotrophic lateral sclerosis 3 and 4; Frontotemporal Dementia Chromosome 3-Linked and Frontotemporal dementia ubiquitin-positive; Fructose-biphosphatase deficiency; Fuhrmann syndrome; Gamma-aminobutyric acid transaminase deficiency; Gamstorp-Wohlfart syndrome; Gaucher disease type 1 and Subacute neuronopathic; Gaze palsy, familial horizontal, with progressive scoliosis; Generalized dominant dystrophic epidermolysis bullosa; Generalized epilepsy with febrile seizures plus 3, type 1, type 2; Epileptic encephalopathy Lennox-Gastaut type; Giant axonal neuropathy; Glanzmann thrombasthenia; Glaucoma 1, open angle, e, F, and G; Glaucoma 3, primary congenital, d; Glaucoma, congenital and Glaucoma, congenital, Coloboma; Glaucoma, primary open angle, juvenile-onset; Glioma susceptibility 1; Glucose transporter type 1 deficiency syndrome; Glucose-6-phosphate transport defect; GLUT1 deficiency syndrome 2; Epilepsy, idiopathic generalized, susceptibility to, 12; Glutamate formiminotransferase deficiency; Glutaric acidemia IIA and IIB; Glutaric aciduria, type 1; Gluthathione synthetase deficiency; Glycogen storage disease 0 (muscle), II (adult form), IXa2, IXc, type 1A; type II, type IV, IV (combined hepatic and myopathic), type V, and type VI; Goldmann-Favre syndrome; Gordon syndrome; Gorlin syndrome; Holoprosencephaly sequence; Holoprosencephaly 7; Granulomatous disease, chronic, X-linked, variant; Granulosa cell tumor of the ovary; Gray platelet syndrome; Griscelli syndrome type 3; Groenouw corneal dystrophy type I; Growth and mental retardation, mandibulofacial dysostosis, microcephaly, and cleft palate; Growth hormone deficiency with pituitary anomalies; Growth hormone insensitivity with immunodeficiency; GTP cyclohydrolase I deficiency; Hajdu-Cheney syndrome; Hand foot uterus syndrome; Hearing impairment; Hemangioma, capillary infantile; Hematologic neoplasm; Hemochromatosis type 1, 2B, and 3; Microvascular complications of diabetes 7; Transferrin serum level quantitative trait locus 2; Hemoglobin H disease, nondeletional; Hemolytic anemia, nonspherocytic, due to glucose phosphate isomerase deficiency; Hemophagocytic lymphohistiocytosis, familial, 2; Hemophagocytic lymphohistiocytosis, familial, 3; Heparin cofactor II deficiency; Hereditary acrodermatitis enteropathica; Hereditary breast and ovarian cancer syndrome; Ataxia-telangiectasia-like disorder; Hereditary diffuse gastric cancer; Hereditary diffuse leukoencephalopathy with spheroids; Hereditary factors II, IX, VIII deficiency disease; Hereditary hemorrhagic telangiectasia type 2; Hereditary insensitivity to pain with anhidrosis; Hereditary lymphedema type I; Hereditary motor and sensory neuropathy with optic atrophy; Hereditary myopathy with early respiratory failure; Hereditary neuralgic amyotrophy; Hereditary Nonpolyposis Colorectal Neoplasms; Lynch syndrome I and II; Hereditary pancreatitis; Pancreatitis, chronic, susceptibility to; Hereditary sensory and autonomic neuropathy type IIB amd IIA; Hereditary sideroblastic anemia; Hermansky-Pudlak syndrome 1, 3, 4, and 6; Heterotaxy, visceral, 2, 4, and 6, autosomal; Heterotaxy, visceral, X-linked; Heterotopia; Histiocytic medullary reticulosis; Histiocytosis-lymphadenopathy plus syndrome; Holocarboxylase synthetase deficiency; Holoprosencephaly 2, 3,7, and 9; Holt-Oram syndrome; Homocysteinemia due to MTHFR deficiency, CBS deficiency, and Homocystinuria, pyridoxine-responsive; Homocystinuria-Megaloblastic anemia due to defect in cobalamin metabolism, cblE complementation type; Howel-Evans syndrome; Hurler syndrome; Hutchinson-Gilford syndrome; Hydrocephalus; Hyperammonemia, type III; Hypercholesterolaemia and Hypercholesterolemia, autosomal recessive; Hyperekplexia 2 and Hyperekplexia hereditary; Hyperferritinemia cataract syndrome; Hyperglycinuria; Hyperimmunoglobulin D with periodic fever; Mevalonic aciduria; Hyperimmunoglobulin E syndrome; Hyperinsulinemic hypoglycemia familial 3, 4, and 5; Hyperinsulinism-hyperammonemia syndrome; Hyperlysinemia; Hypermanganesemia with dystonia, polycythemia and cirrhosis; Hyperornithinemia-hyperammonemia-homocitrullinuria syndrome; Hyperparathyroidism 1 and 2; Hyperparathyroidism, neonatal severe; Hyperphenylalaninemia, bh4-deficient, a, due to partial pts deficiency, BH4-deficient, D, and non-pku; Hyperphosphatasia with mental retardation syndrome 2, 3, and 4; Hypertrichotic osteochondrodysplasia; Hypobetalipoproteinemia, familial, associated with apob32; Hypocalcemia, autosomal dominant 1; Hypocalciuric hypercalcemia, familial, types 1 and 3; Hypochondrogenesis; Hypochromic microcytic anemia with iron overload; Hypoglycemia with deficiency of glycogen synthetase in the liver; Hypogonadotropic hypogonadism 11 with or without anosmia; Hypohidrotic ectodermal dysplasia with immune deficiency; Hypohidrotic X-linked ectodermal dysplasia; Hypokalemic periodic paralysis 1 and 2; Hypomagnesemia 1, intestinal; Hypomagnesemia, seizures, and mental retardation; Hypomyelinating leukodystrophy 7; Hypoplastic left heart syndrome; Atrioventricular septal defect and common atrioventricular junction; Hypospadias 1 and 2, X-linked; Hypothyroidism, congenital, nongoitrous, 1; Hypotrichosis 8 and 12; Hypotrichosis-lymphedema-telangiectasia syndrome; I blood group system; Ichthyosis bullosa of Siemens; Ichthyosis exfoliativa; Ichthyosis prematurity syndrome; Idiopathic basal ganglia calcification 5; Idiopathic fibrosing alveolitis, chronic form; Dyskeratosis congenita, autosomal dominant, 2 and 5; Idiopathic hypercalcemia of infancy; Immune dysfunction with T-cell inactivation due to calcium entry defect 2; Immunodeficiency 15, 16, 19, 30, 31C, 38, 40, 8, due to defect in cd3-zeta, with hyper IgM type 1 and 2, and X-Linked, with magnesium defect, Epstein-Barr virus infection, and neoplasia; Immunodeficiency-centromeric instability-facial anomalies syndrome 2; Inclusion body myopathy 2 and 3; Nonaka myopathy; Infantile convulsions and paroxysmal choreoathetosis, familial; Infantile cortical hyperostosis; Infantile GM1 gangliosidosis; Infantile hypophosphatasia; Infantile nephronophthisis; Infantile nystagmus, X-linked; Infantile Parkinsonism-dystonia; Infertility associated with multi-tailed spermatozoa and excessive DNA; Insulin resistance; Insulin-resistant diabetes mellitus and acanthosis nigricans; Insulin-dependent diabetes mellitus secretory diarrhea syndrome; Interstitial nephritis, karyomegalic; Intrauterine growth retardation, metaphyseal dysplasia, adrenal hypoplasia congenita, and genital anomalies; Iodotyrosyl coupling defect; IRAK4 deficiency; Iridogoniodysgenesis dominant type and type 1; Iron accumulation in brain; Ischiopatellar dysplasia; Islet cell hyperplasia; Isolated 17,20-lyase deficiency; Isolated lutropin deficiency; Isovaleryl-CoA dehydrogenase deficiency; Jankovic Rivera syndrome; Jervell and Lange-Nielsen syndrome 2; Joubert syndrome 1, 6, 7, 9/15 (digenic), 14, 16, and 17, and Orofaciodigital syndrome xiv; Junctional epidermolysis bullosa gravis of Herlitz; Juvenile GM>1<gangliosidosis; Juvenile polyposis syndrome; Juvenile polyposis/hereditary hemorrhagic telangiectasia syndrome; Juvenile retinoschisis; Kabuki make-up syndrome; Kallmann syndrome 1, 2, and 6; Delayed puberty; Kanzaki disease; Karak syndrome; Kartagener syndrome; Kenny-Caffey syndrome type 2; Keppen-Lubinsky syndrome; Keratoconus 1; Keratosis follicularis; Keratosis palmoplantaris striata 1; Kindler syndrome; L-2-hydroxyglutaric aciduria; Larsen syndrome, dominant type; Lattice corneal dystrophy Type III; Leber amaurosis; Zellweger syndrome; Peroxisome biogenesis disorders; Zellweger syndrome spectrum; Leber congenital amaurosis 11, 12, 13, 16, 4, 7, and 9; Leber optic atrophy; Aminoglycoside-induced deafness; Deafness, nonsyndromic sensorineural, mitochondrial; Left ventricular noncompaction 5; Left-right axis malformations; Leigh disease; Mitochondrial short-chain Enoyl-CoA Hydratase 1 deficiency; Leigh syndrome due to mitochondrial complex I deficiency; Leiner disease; Leri Weill dyschondrosteosis; Lethal congenital contracture syndrome 6; Leukocyte adhesion deficiency type I and III; Leukodystrophy, Hypomyelinating, 11 and 6; Leukoencephalopathy with ataxia, with Brainstem and Spinal Cord Involvement and Lactate Elevation, with vanishing white matter, and progressive, with ovarian failure; Leukonychia totalis; Lewy body dementia; Lichtenstein-Knorr Syndrome; Li-Fraumeni syndrome 1; Lig4 syndrome; Limb-girdle muscular dystrophy, type 1B, 2A, 2B, 2D, C1, C5, C9, C14; Congenital muscular dystrophy-dystroglycanopathy with brain and eye anomalies, type A14 and B14; Lipase deficiency combined; Lipid proteinosis; Lipodystrophy, familial partial, type 2 and 3; Lissencephaly 1, 2 (X-linked), 3, 6 (with microcephaly), X-linked; Subcortical laminar heterotopia, X-linked; Liver failure acute infantile; Loeys-Dietz syndrome 1, 2, 3; Long QT syndrome 1, 2, 2/9, 2/5, (digenic), 3, 5 and 5, acquired, susceptibility to; Lung cancer; Lymphedema, hereditary, id; Lymphedema, primary, with myelodysplasia; Lymphoproliferative syndrome 1, 1 (X-linked), and 2; Lysosomal acid lipase deficiency; Macrocephaly, macrosomia, facial dysmorphism syndrome; Macular dystrophy, vitelliform, adult-onset; Malignant hyperthermia susceptibility type 1; Malignant lymphoma, non-Hodgkin; Malignant melanoma; Malignant tumor of prostate; Mandibuloacral dysostosis; Mandibuloacral dysplasia with type A or B lipodystrophy, atypical; Mandibulofacial dysostosis, Treacher Collins type, autosomal recessive; Mannose-binding protein deficiency; Maple syrup urine disease type lA and type 3; Marden Walker like syndrome; Marfan syndrome; Marinesco-Sjxc3xb6gren syndrome; Martsolf syndrome; Maturity-onset diabetes of the young, type 1, type 2, type 11, type 3, and type 9; May-Hegglin anomaly; MYH9 related disorders; Sebastian syndrome; McCune-Albright syndrome; Somatotroph adenoma; Sex cord-stromal tumor; Cushing syndrome; McKusick Kaufman syndrome; McLeod neuroacanthocytosis syndrome; Meckel-Gruber syndrome; Medium-chain acyl-coenzyme A dehydrogenase deficiency; Medulloblastoma; Megalencephalic leukoencephalopathy with subcortical cysts land 2a; Megalencephaly cutis marmorata telangiectatica congenital; PIK3CA Related Overgrowth Spectrum; Megalencephaly-polymicrogyria-polydactyly-hydrocephalus syndrome 2; Megaloblastic anemia, thiamine-responsive, with diabetes mellitus and sensorineural deafness; Meier-Gorlin syndromes land 4; Melnick-Needles syndrome; Meningioma; Mental retardation, X-linked, 3, 21, 30, and 72; Mental retardation and microcephaly with pontine and cerebellar hypoplasia; Mental retardation X-linked syndromic 5; Mental retardation, anterior maxillary protrusion, and strabismus; Mental retardation, autosomal dominant 12, 13, 15, 24, 3, 30, 4, 5, 6,and 9; Mental retardation, autosomal recessive 15, 44, 46, and 5; Mental retardation, stereotypic movements, epilepsy, and/or cerebral malformations; Mental retardation, syndromic, Claes-Jensen type, X-linked; Mental retardation, X-linked, nonspecific, syndromic, Hedera type, and syndromic, wu type; Merosin deficient congenital muscular dystrophy; Metachromatic leukodystrophy juvenile, late infantile, and adult types; Metachromatic leukodystrophy; Metatrophic dysplasia; Methemoglobinemia types I and 2; Methionine adenosyltransferase deficiency, autosomal dominant; Methylmalonic acidemia with homocystinuria; Methylmalonic aciduria cblB type; Methylmalonic aciduria due to methylmalonyl-CoA mutase deficiency; Methylmalonic aciduria, mut(0) type; Microcephalic osteodysplastic primordial dwarfism type 2; Microcephaly with or without chorioretinopathy, lymphedema, or mental retardation; Microcephaly, hiatal hernia and nephrotic syndrome; Microcephaly; Hypoplasia of the corpus callosum; Spastic paraplegia 50, autosomal recessive; Global developmental delay; CNS hypomyelination; Brain atrophy; Microcephaly, normal intelligence and immunodeficiency; Microcephaly-capillary malformation syndrome; Microcytic anemia; Microphthalmia syndromic 5, 7, and 9; Microphthalmia, isolated 3, 5, 6, 8, and with coloboma 6; Microspherophakia; Migraine, familial basilar; Miller syndrome; Minicore myopathy with external ophthalmoplegia; Myopathy, congenital with cores; Mitchell-Riley syndrome; mitochondrial 3-hydroxy-3-methylglutaryl-CoA synthase deficiency; Mitochondrial complex I, II, III, III (nuclear type 2, 4, or 8) deficiency; Mitochondrial DNA depletion syndrome 11, 12 (cardiomyopathic type), 2, 4B (MNGIE type), 8B (MNGIE type); Mitochondrial DNA-depletion syndrome 3 and 7, hepatocerebral types, and 13 (encephalomyopathic type); Mitochondrial phosphate carrier and pyruvate carrier deficiency; Mitochondrial trifunctional protein deficiency; Long-chain 3-hydroxyacyl-CoA dehydrogenase deficiency; Miyoshi muscular dystrophy 1; Myopathy, distal, with anterior tibial onset; Mohr-Tranebjaerg syndrome; Molybdenum cofactor deficiency, complementation group A; Mowat-Wilson syndrome; Mucolipidosis III Gamma; Mucopolysaccharidosis type VI, type VI (severe), and type VII; Mucopolysaccharidosis, MPS-I-H/S, MPS-II, MPS-III-A, MPS-III-B, MPS-III-C, MPS-IV-A, MPS-IV-B; Retinitis Pigmentosa 73; Gangliosidosis GM1 typel (with cardiac involvenment) 3; Multicentric osteolysis nephropathy; Multicentric osteolysis, nodulosis and arthropathy; Multiple congenital anomalies; Atrial septal defect 2; Multiple congenital anomalies-hypotonia-seizures syndrome 3; Multiple Cutaneous and Mucosal Venous Malformations; Multiple endocrine neoplasia, types land 4; Multiple epiphyseal dysplasia 5 or Dominant; Multiple gastrointestinal atresias; Multiple pterygium syndrome Escobar type; Multiple sulfatase deficiency; Multiple synostoses syndrome 3; Muscle AMP deaminase deficiency; Muscle eye brain disease; Muscular dystrophy, congenital, megaconial type; Myasthenia, familial infantile, 1; Myasthenic Syndrome, Congenital, 11, associated with acetylcholine receptor deficiency; Myasthenic Syndrome, Congenital, 17, 2A (slow-channel), 4B (fast-channel), and without tubular aggregates; Myeloperoxidase deficiency; MYH-associated polyposis; Endometrial carcinoma; Myocardial infarction 1; Myoclonic dystonia; Myoclonic-Atonic Epilepsy; Myoclonus with epilepsy with ragged red fibers; Myofibrillar myopathy 1 and ZASP-related; Myoglobinuria, acute recurrent, autosomal recessive; Myoneural gastrointestinal encephalopathy syndrome; Cerebellar ataxia infantile with progressive external ophthalmoplegia; Mitochondrial DNA depletion syndrome 4B, MNGIE type; Myopathy, centronuclear, 1, congenital, with excess of muscle spindles, distal, 1, lactic acidosis, and sideroblastic anemia 1, mitochondrial progressive with congenital cataract, hearing loss, and developmental delay, and tubular aggregate, 2; Myopia 6; Myosclerosis, autosomal recessive; Myotonia congenital; Congenital myotonia, autosomal dominant and recessive forms; Nail-patella syndrome; Nance-Horan syndrome; Nanophthalmos 2; Navajo neurohepatopathy; Nemaline myopathy 3 and 9; Neonatal hypotonia; Intellectual disability; Seizures; Delayed speech and language development; Mental retardation, autosomal dominant 31; Neonatal intrahepatic cholestasis caused by citrin deficiency; Nephrogenic diabetes insipidus, Nephrogenic diabetes insipidus, X-linked; Nephrolithiasis/osteoporosis, hypophosphatemic, 2; Nephronophthisis 13, 15 and 4; Infertility; Cerebello-oculo-renal syndrome (nephronophthisis, oculomotor apraxia and cerebellar abnormalities); Nephrotic syndrome, type 3, type 5, with or without ocular abnormalities, type 7, and type 9; Nestor-Guillermo progeria syndrome; Neu-Laxova syndrome 1; Neurodegeneration with brain iron accumulation 4 and 6; Neuroferritinopathy; Neurofibromatosis, type land type 2; Neurofibrosarcoma; Neurohypophyseal diabetes insipidus; Neuropathy, Hereditary Sensory, Type IC; Neutral 1 amino acid transport defect; Neutral lipid storage disease with myopathy; Neutrophil immunodeficiency syndrome; Nicolaides-Baraitser syndrome; Niemann-Pick disease type C1, C2, type A, and type C1, adult form; Non-ketotic hyperglycinemia; Noonan syndrome 1 and 4, LEOPARD syndrome 1; Noonan syndrome-like disorder with or without juvenile myelomonocytic leukemia; Normokalemic periodic paralysis, potassium-sensitive; Norum disease; Epilepsy, Hearing Loss, And Mental Retardation Syndrome; Mental Retardation, X-Linked 102 and syndromic 13; Obesity; Ocular albinism, type I; Oculocutaneous albinism type 1B, type 3, and type 4; Oculodentodigital dysplasia; Odontohypophosphatasia; Odontotrichomelic syndrome; Oguchi disease; Oligodontia-colorectal cancer syndrome; Opitz G/BBB syndrome; Optic atrophy 9; Oral-facial-digital syndrome; Ornithine aminotransferase deficiency; Orofacial cleft 11 and 7, Cleft lip/palate-ectodermal dysplasia syndrome; Orstavik Lindemann Solberg syndrome; Osteoarthritis with mild chondrodysplasia; Osteochondritis dissecans; Osteogenesis imperfecta type 12, type 5, type 7, type 8, type I, type III, with normal sclerae, dominant form, recessive perinatal lethal; Osteopathia striata with cranial sclerosis; Osteopetrosis autosomal dominant type 1 and 2, recessive 4, recessive 1, recessive 6; Osteoporosis with pseudoglioma; Oto-palato-digital syndrome, types I and II; Ovarian dysgenesis 1; Ovarioleukodystrophy; Pachyonychia congenita 4 and type 2; Paget disease of bone, familial; Pallister-Hall syndrome; Palmoplantar keratoderma, nonepidermolytic, focal or diffuse; Pancreatic agenesis and congenital heart disease; Papillon-Lef\xc3\xa8vre syndrome; Paragangliomas 3; Paramyotonia congenita of von Eulenburg; Parathyroid carcinoma; Parkinson disease 14, 15, 19 (juvenile-onset), 2, 20 (early-onset), 6, (autosomal recessive early-onset, and 9; Partial albinism; Partial hypoxanthine-guanine phosphoribosyltransferase deficiency; Patterned dystrophy of retinal pigment epithelium; PC-K6a; Pelizaeus-Merzbacher disease; Pendred syndrome; Peripheral demyelinating neuropathy, central dysmyelination; Hirschsprung disease; Permanent neonatal diabetes mellitus; Diabetes mellitus, permanent neonatal, with neurologic features; Neonatal insulin-dependent diabetes mellitus; Maturity-onset diabetes of the young, type 2; Peroxisome biogenesis disorder 14B, 2A, 4A, 5B, 6A, 7A, and 7B; Perrault syndrome 4; Perry syndrome; Persistent hyperinsulinemic hypoglycemia of infancy; familial hyperinsulinism; Phenotypes; Phenylketonuria; Pheochromocytoma; Hereditary Paraganglioma-Pheochromocytoma Syndromes; Paragangliomas 1; Carcinoid tumor of intestine; Cowden syndrome 3; Phosphoglycerate dehydrogenase deficiency; Phosphoglycerate kinase 1 deficiency; Photosensitive trichothiodystrophy; Phytanic acid storage disease; Pick disease; Pierson syndrome; Pigmentary retinal dystrophy; Pigmented nodular adrenocortical disease, primary, 1; Pilomatrixoma; Pitt-Hopkins syndrome; Pituitary dependent hypercortisolism; Pituitary hormone deficiency, combined 1, 2, 3, and 4; Plasminogen activator inhibitor type 1 deficiency; Plasminogen deficiency, type I; Platelet-type bleeding disorder 15 and 8; Poikiloderma, hereditary fibrosing, with tendon contractures, myopathy, and pulmonary fibrosis; Polycystic kidney disease 2, adult type, and infantile type; Polycystic lipomembranous osteodysplasia with sclerosing leukoencephalopathy; Polyglucosan body myopathy 1 with or without immunodeficiency; Polymicrogyria, asymmetric, bilateral frontoparietal; Polyneuropathy, hearing loss, ataxia, retinitis pigmentosa, and cataract; Pontocerebellar hypoplasia type 4; Popliteal pterygium syndrome; Porencephaly 2; Porokeratosis 8, disseminated superficial actinic type; Porphobilinogen synthase deficiency; Porphyria cutanea tarda; Posterior column ataxia with retinitis pigmentosa; Posterior polar cataract type 2; Prader-Willi-like syndrome; Premature ovarian failure 4, 5, 7, and 9; Primary autosomal recessive microcephaly 10, 2, 3, and 5; Primary ciliary dyskinesia 24; Primary dilated cardiomyopathy; Left ventricular noncompaction 6; 4, Left ventricular noncompaction 10; Paroxysmal atrial fibrillation; Primary hyperoxaluria, type I, type, and type III; Primary hypertrophic osteoarthropathy, autosomal recessive 2; Primary hypomagnesemia; Primary open angle glaucoma juvenile onset 1; Primary pulmonary hypertension; Primrose syndrome; Progressive familial heart block type 1B; Progressive familial intrahepatic cholestasis 2 and 3; Progressive intrahepatic cholestasis; Progressive myoclonus epilepsy with ataxia; Progressive pseudorheumatoid dysplasia; Progressive sclerosing poliodystrophy; Prolidase deficiency; Proline dehydrogenase deficiency; Schizophrenia 4; Properdin deficiency, X-linked; Propionic academia; Proprotein convertase 1/3 deficiency; Prostate cancer, hereditary, 2; Protan defect; Proteinuria; Finnish congenital nephrotic syndrome; Proteus syndrome; Breast adenocarcinoma; Pseudoachondroplastic spondyloepiphyseal dysplasia syndrome; Pseudohypoaldosteronism type 1 autosomal dominant and recessive and type 2; Pseudohypoparathyroidism type 1A, Pseudopseudohypoparathyroidism; Pseudoneonatal adrenoleukodystrophy; Pseudoprimary hyperaldosteronism; Pseudoxanthoma elasticum; Generalized arterial calcification of infancy 2; Pseudoxanthoma elasticum-like disorder with multiple coagulation factor deficiency; Psoriasis susceptibility 2; PTEN hamartoma tumor syndrome; Pulmonary arterial hypertension related to hereditary hemorrhagic telangiectasia; Pulmonary Fibrosis And/Or Bone Marrow Failure, Telomere-Related, 1 and 3; Pulmonary hypertension, primary, 1, with hereditary hemorrhagic telangiectasia; Purine-nucleoside phosphorylase deficiency; Pyruvate carboxylase deficiency; Pyruvate dehydrogenase El-alpha deficiency; Pyruvate kinase deficiency of red cells; Raine syndrome; Rasopathy; Recessive dystrophic epidermolysis bullosa; Nail disorder, nonsyndromic congenital, 8; Reifenstein syndrome; Renal adysplasia; Renal carnitine transport defect; Renal coloboma syndrome; Renal dysplasia; Renal dysplasia, retinal pigmentary dystrophy, cerebellar ataxia and skeletal dysplasia; Renal tubular acidosis, distal, autosomal recessive, with late-onset sensorineural hearing loss, or with hemolytic anemia; Renal tubular acidosis, proximal, with ocular abnormalities and mental retardation; Retinal cone dystrophy 3B; Retinitis pigmentosa; Retinitis pigmentosa 10, 11, 12, 14, 15, 17, and 19; Retinitis pigmentosa 2, 20, 25, 35, 36, 38, 39, 4, 40, 43, 45, 48, 66, 7, 70, 72; Retinoblastoma; Rett disorder; Rhabdoid tumor predisposition syndrome 2; Rhegmatogenous retinal detachment, autosomal dominant; Rhizomelic chondrodysplasia punctata type 2 and type 3; Roberts-SC phocomelia syndrome; Robinow Sorauf syndrome; Robinow syndrome, autosomal recessive, autosomal recessive, with brachy-syn-polydactyly; Rothmund-Thomson syndrome; Rapadilino syndrome; RRM2B-related mitochondrial disease; Rubinstein-Taybi syndrome; Salla disease; Sandhoff disease, adult and infantil types; Sarcoidosis, early-onset; Blau syndrome; Schindler disease, type 1; Schizencephaly; Schizophrenia 15; Schneckenbecken dysplasia; Schwannomatosis 2; Schwartz Jampel syndrome type 1; Sclerocornea, autosomal recessive; Sclerosteosis; Secondary hypothyroidism; Segawa syndrome, autosomal recessive; Senior-Loken syndrome 4 and 5; Sensory ataxic neuropathy, dysarthria, and ophthalmoparesis; Sepiapterin reductase deficiency; SeSAME syndrome; Severe combined immunodeficiency due to ADA deficiency, with microcephaly, growth retardation, and sensitivity to ionizing radiation, atypical, autosomal recessive, T cell-negative, B cell-positive, NK cell-negative of NK-positive; Partial cytosine deaminase deficiency; Severe congenital neutropenia; Severe congenital neutropenia 3, autosomal recessive or dominant; Severe congenital neutropenia and 6, autosomal recessive; Severe myoclonic epilepsy in infancy; Generalized epilepsy with febrile seizures plus, types 1 and 2; Severe X-linked myotubular myopathy; Short QT syndrome 3; Short stature with nonspecific skeletal abnormalities; Short stature, auditory canal atresia, mandibular hypoplasia, skeletal abnormalities; Short stature, onychodysplasia, facial dysmorphism, and hypotrichosis; Primordial dwarfism; Short-rib thoracic dysplasia 11 or 3 with or without polydactyly; Sialidosis type I and II; Silver spastic paraplegia syndrome; Slowed nerve conduction velocity, autosomal dominant; Smith-Lemli-Opitz syndrome; Snyder Robinson syndrome; Somatotroph adenoma; Prolactinoma; familial, Pituitary adenoma predisposition; Sotos syndrome 1 or 2; Spastic ataxia 5, autosomal recessive, Charlevoix-Saguenay type, 1,10, or 11, autosomal recessive; Amyotrophic lateral sclerosis type 5; Spastic paraplegia 15, 2, 3, 35, 39, 4, autosomal dominant, 55, autosomal recessive, and 5A; Bile acid synthesis defect, congenital, 3; Spermatogenic failure 11, 3, and 8; Spherocytosis types 4 and 5; Spheroid body myopathy; Spinal muscular atrophy, lower extremity predominant 2, autosomal dominant; Spinal muscular atrophy, type II; Spinocerebellar ataxia 14, 21, 35, 40,and 6; Spinocerebellar ataxia autosomal recessive 1 and 16; Splenic hypoplasia; Spondylocarpotarsal synostosis syndrome; Spondylocheirodysplasia, Ehlers-Danlos syndrome-like, with immune dysregulation, Aggrecan type, with congenital joint dislocations, short limb-hand type, Sedaghatian type, with cone-rod dystrophy, and Kozlowski type; Parastremmatic dwarfism; Stargardt disease 1; Cone-rod dystrophy 3; Stickler syndrome type 1; Kniest dysplasia; Stickler syndrome, types 1(nonsyndromic ocular) and 4; Sting-associated vasculopathy, infantile-onset; Stormorken syndrome; Sturge-Weber syndrome, Capillary malformations, congenital, 1; Succinyl-CoA acetoacetate transferase deficiency; Sucrase-isomaltase deficiency; Sudden infant death syndrome; Sulfite oxidase deficiency, isolated; Supravalvar aortic stenosis; Surfactant metabolism dysfunction, pulmonary, 2 and 3; Symphalangism, proximal, lb; Syndactyly Cenani Lenz type; Syndactyly type 3; Syndromic X-linked mental retardation 16; Talipes equinovarus; Tangier disease; TARP syndrome; Tay-Sachs disease, B1 variant, Gm2-gangliosidosis (adult), Gm2-gangliosidosis (adult-onset); Temtamy syndrome; Tenorio Syndrome; Terminal osseous dysplasia; Testosterone 17-beta-dehydrogenase deficiency; Tetraamelia, autosomal recessive; Tetralogy of Fallot; Hypoplastic left heart syndrome 2; Truncus arteriosus; Malformation of the heart and great vessels; Ventricular septal defect 1; Thiel-Behnke corneal dystrophy; Thoracic aortic aneurysms and aortic dissections; Marfanoid habitus; Three M syndrome 2; Thrombocytopenia, platelet dysfunction, hemolysis, and imbalanced globin synthesis; Thrombocytopenia, X-linked; Thrombophilia, hereditary, due to protein C deficiency, autosomal dominant and recessive; Thyroid agenesis; Thyroid cancer, follicular; Thyroid hormone metabolism, abnormal; Thyroid hormone resistance, generalized, autosomal dominant; Thyrotoxic periodic paralysis and Thyrotoxic periodic paralysis 2; Thyrotropin-releasing hormone resistance, generalized; Timothy syndrome; TNF receptor-associated periodic fever syndrome (TRAPS); Tooth agenesis, selective, 3 and 4; Torsades de pointes; Townes-Brocks-branchiootorenal-like syndrome; Transient bullous dermolysis of the newborn; Treacher collins syndrome 1; Trichomegaly with mental retardation, dwarfism and pigmentary degeneration of retina; Trichorhinophalangeal dysplasia type I; Trichorhinophalangeal syndrome type 3; Trimethylaminuria; Tuberous sclerosis syndrome; Lymphangiomyomatosis; Tuberous sclerosis 1 and 2; Tyrosinase-negative oculocutaneous albinism; Tyrosinase-positive oculocutaneous albinism; Tyrosinemia type I; UDPglucose-4-epimerase deficiency; Ullrich congenital muscular dystrophy; Ulna and fibula absence of with severe limb deficiency; Upshaw-Schulman syndrome; Urocanate hydratase deficiency; Usher syndrome, types 1, 1B, 1D, 1G, 2A, 2C, and 2D; Retinitis pigmentosa 39; UV-sensitive syndrome; Van der Woude syndrome; Van Maldergem syndrome 2; Hennekam lymphangiectasia-lymphedema syndrome 2; Variegate porphyria; Ventriculomegaly with cystic kidney disease; Verheij syndrome; Very long chain acyl-CoA dehydrogenase deficiency; Vesicoureteral reflux 8; Visceral heterotaxy 5, autosomal; Visceral myopathy; Vitamin D-dependent rickets, types land 2; Vitelliform dystrophy; von Willebrand disease type 2M and type 3; Waardenburg syndrome type 1, 4C, and 2E (with neurologic involvement); Klein-Waardenberg syndrome; Walker-Warburg congenital muscular dystrophy; Warburg micro syndrome 2 and 4; Warts, hypogammaglobulinemia, infections, and myelokathexis; Weaver syndrome; Weill-Marchesani syndrome 1 and 3; Weill-Marchesani-like syndrome; Weissenbacher-Zweymuller syndrome; Werdnig-Hoffmann disease; Charcot-Marie-Tooth disease; Werner syndrome; WFS1-Related Disorders; Wiedemann-Steiner syndrome; Wilson disease; Wolfram-like syndrome, autosomal dominant; Worth disease; Van Buchem disease type 2; Xeroderma pigmentosum, complementation group b, group D, group E, and group G; X-linked agammaglobulinemia; X-linked hereditary motor and sensory neuropathy; X-linked ichthyosis with steryl-sulfatase deficiency; X-linked periventricular heterotopia; Oto-palato-digital syndrome, type I; X-linked severe combined immunodeficiency; Zimmermann-Laband syndrome and Zimmermann-Laband syndrome 2; and Zonular pulverulent cataract 3.

[0472] In some aspects, the present disclosure provides uses of any one of the fusion proteins described herein and a guide RNA targeting this base editor to a target C:G base pair in a nucleic acid molecule in the manufacture of a kit for nucleic acid editing, wherein the nucleic acid editing comprises contacting the nucleic acid molecule with the base editor and guide RNA under conditions suitable for the substitution of the cytosine (C) of the C:G nucleobase pair with an guanine (G). In some embodiments of these uses, the nucleic acid molecule is a double-stranded DNA molecule. In some embodiments, the step of contacting induces separation of the double-stranded DNA at a target region. In some embodiments, the step of contacting thereby comprises the nicking of one strand of the double-stranded DNA, wherein the one strand comprises an unmutated strand that comprises the G of the target C:G nucleobase pair.

[0473] In some embodiments of the described uses, the step of contacting is performed in vitro. In other embodiments, the step of contacting is performed in vivo. In some embodiments, the step of contacting is performed in a subject (e.g., a human subject or a non-human animal subject). In some embodiments, the step of contacting is performed in an experimental animal, such as a rodent or monkey. In some embodiments, the step of contacting is performed in a cell, such as a human or non-human animal cell.

[0474] The present disclosure also provides uses of any one of the fusion proteins described herein as a medicament. The present disclosure also provides uses of any one of the complexes of fusion proteins and guide RNAs described herein as a medicament.

### Base Editor Efficiency

[0475] Some aspects of the disclosure are based on the recognition that any of the fusion proteins provided herein are capable of modifying a specific nucleotide base without generating a significant proportion of indels. An “indel”, as used herein, refers to the insertion or deletion of a nucleotide base within a nucleic acid. Such insertions or deletions can lead to frame shift mutations within a coding region of a gene. In some embodiments, it is desirable to generate fusion proteins that efficiently modify (e.g. mutate or deaminate) a specific nucleotide within a nucleic acid, without generating a large number of insertions or deletions (i.e., indels) in the nucleic acid. In certain embodiments, any of the fusion proteins provided herein are capable of generating a greater proportion of intended modifications (e.g., C-to-G editing) versus indels. In some embodiments, the fusion proteins provided herein are capable of generating a ratio of intended point mutations to indels that is greater than 1:1. In some embodiments, the fusion proteins provided herein are capable of generating a ratio of intended point mutations to indels that is at least 1.5:1, at least 2:1, at least 2.5:1, at least 3:1, at least 3.5:1, at least 4:1, at least 4.5:1, at least 5:1, at least 5.5:1, at least 6:1, at least 6.5:1, at least 7:1, at least 7.5:1, at least 8:1, at least 10:1, at least 12:1, at least 15:1, at least 20:1, at least 25:1, at least 30:1, at least 40:1, at least 50:1, at least 100:1, at least 200:1, at least 300:1, at least 400:1, at least 500:1, at least 600:1, at least 700:1, at least 800:1, at least 900:1, or at least 1000:1, or more. The number of intended mutations and indels may be determined using any suitable method, for example the methods used in the below Examples. In some embodiments, to calculate indel frequencies, sequencing reads are scanned for exact matches to two 10-bp sequences that flank both sides of a window in which indels might occur. If no exact matches are located, the read is excluded from analysis. If the length of this indel window exactly matches the reference sequence the read is classified as not containing an indel. If the indel window is two or more bases longer or shorter than the reference sequence, then the sequencing read is classified as an insertion or deletion, respectively.

[0476] In some embodiments, the fusion proteins provided herein are capable of limiting formation of indels in a region of a nucleic acid. In some embodiments, the region is at a nucleotide targeted by a base editor or a region within 2, 3, 4, 5, 6, 7, 8, 9, or 10 nucleotides of a nucleotide targeted by a base editor. In some embodiments, any of the fusion proteins provided herein are capable of limiting the formation of indels at a region of a nucleic acid to less than 1%, less than 1.5%, less than 2%, less than 2.5%, less than 3%, less than 3.5%, less than 4%, less than 4.5%, less than 5%, less than 6%, less than 7%, less than 8%, less than 9%, less than 10%, less than 12%, less than 15%, or less than 20%. The number of indels formed at a nucleic acid region may depend on the amount of time a nucleic acid (e.g., a nucleic acid within the genome of a cell) is exposed to a base editor. In some embodiments, an number or proportion of indels is determined after at least 1 hour, at least 2 hours, at least 6 hours, at least 12 hours, at least 24 hours, at least 36 hours, at least 48 hours, at least 3 days, at least 4 days, at least 5 days, at least 7 days, at least 10 days, or at least 14 days of exposing a nucleic acid (e.g., a nucleic acid within the genome of a cell) to a base editor.

[0477] Some aspects of the disclosure are based on the recognition that any of the base editors provided herein are capable of efficiently generating an intended mutation, such as a point mutation, in a nucleic acid (e.g. a nucleic acid within a genome of a subject) without generating a significant number of unintended mutations, such as unintended point mutations. In some embodiments, an intended mutation is a mutation that is generated by a specific base editor bound to a gRNA, specifically designed to generate the intended mutation. In some embodiments, the intended mutation is a mutation associated with a disease or disorder. In some embodiments, the intended mutation is a cytosine (C) to guanine (G) point mutation associated with a disease or disorder. In some embodiments, the intended mutation is a guanine (G) to cytosine (C) point mutation associated with a disease or disorder. In some embodiments, the intended mutation is a cytosine (C) to guanine (G) point mutation within the coding region of a gene. In some embodiments, the intended mutation is a Guanine (G) to cytosine (C) point mutation within the coding region of a gene. In some embodiments, the intended mutation is a point mutation that generates a stop codon, for example, a premature stop codon within the coding region of a gene. In some embodiments, the intended mutation is a mutation that eliminates a stop codon. In some embodiments, the intended mutation is a mutation that alters the splicing of a gene. In some embodiments, the intended mutation is a mutation that alters the regulatory sequence of a gene (e.g., a gene promotor or gene repressor). In some embodiments, any of the base editors provided herein are capable of generating a ratio of intended mutations to unintended mutations (e.g., intended point mutations:unintended point mutations) that is greater than 1:1. In some embodiments, any of the base editors provided herein are capable of generating a ratio of intended mutations to unintended mutations (e.g., intended point mutations:unintended point mutations) that is at least 1.5:1, at least 2:1, at least 2.5:1, at least 3:1, at least 3.5:1, at least 4:1, at least 4.5:1, at least 5:1, at least 5.5:1, at least 6:1, at least 6.5:1, at least 7:1, at least 7.5:1, at least 8:1, at least 10:1, at least 12:1, at least 15:1, at least 20:1, at least 25:1, at least 30:1, at least 40:1, at least 50:1, at least 100:1, at least 150:1, at least 200:1, at least 250:1, at least 500:1, or at least 1000:1, or more. It should be appreciated that the characteristics of the base editors described in the “Base Editor Efficiency” section, herein, may be applied to any of the fusion proteins, or methods of using the fusion proteins provided herein.

### Methods for Editing Nucleic Acids

[0478] Some aspects of the disclosure provide methods for editing a nucleic acid. In some embodiments, the method is a method for editing a nucleobase of a nucleic acid (e.g., a base pair of a double-stranded DNA sequence). In some embodiments, the method comprises the steps of: a) contacting a target region of a nucleic acid (e.g., a double-stranded DNA sequence) with a complex comprising a base editor (e.g., a Cas9 domain fused to a cytidine deaminase and a uracil binding protein) and a guide nucleic acid (e.g., gRNA), wherein the target region comprises a targeted nucleobase pair, b) inducing strand separation of said target region, c) converting a first nucleobase of said target nucleobase pair in a single strand of the target region to a second nucleobase, d) excising the second nucleobase, thereby creating an abasic site, and e) replacing a third nucleobase complementary to the first nucleobase base with a fourth nucleobase that is a cytosine (C). In some embodiments, the method results in less than 20% indel formation in the nucleic acid. It should be appreciated that in some embodiments, step b is omitted. In some embodiments, the first nucleobase is a cytosine (C). In some embodiments, the second nucleobase is a deaminated cytosine, or uracil. In some embodiments, the third nucleobase is a guanine (G). In some embodiments, the fourth nucleobase is a cytosine (C). In some embodiments, a fifth nucleobase is ligated into the abasic site generated in step (d). In some embodiments the fifth nucleobase is guanine (G). In some embodiments, the method results in less than 19%, 18%, 16%, 14%, 12%, 10%, 8%, 6%, 4%, 2%, 1%, 0.5%, 0.2%, or less than 0.1% indel formation. In some embodiments, at least 5% of the intended base pairs are edited. In some embodiments, at least 10%, 15%, 20%, 25%, 30%, 35%, 40%, 45%, or 50% of the intended base pairs are edited.

[0479] In some embodiments, the ratio of intended products to unintended products in the target nucleotide is at least 2:1, 5:1, 10:1, 20:1, 30:1, 40:1, 50:1, 60:1, 70:1, 80:1, 90:1, 100:1, or 200:1, or more. In some embodiments, the ratio of intended point mutation to indel formation is greater than 1:1, 10:1, 50:1, 100:1, 500:1, or 1000:1, or more. In some embodiments, the cut single strand (nicked strand) is hybridized to the guide nucleic acid. In some embodiments, the nicked single strand is opposite to the strand comprising the first nucleobase. In some embodiments, the base editor comprises a Cas9 domain. In some embodiments, the base editor comprises nickase activity. In some embodiments, the intended edited base pair is upstream of a PAM site. In some embodiments, the intended edited base pair is 1, 2, 3, 4, 5, 6, 7, 8, 9, 10, 11, 12, 13, 14, 15, 16, 17, 18, 19, or 20 nucleotides upstream of the PAM site. In some embodiments, the intended edited basepair is downstream of a PAM site. In some embodiments, the intended edited base pair is 1, 2, 3, 4, 5, 6, 7, 8, 9, 10, 11, 12, 13, 14, 15, 16, 17, 18, 19, or 20 nucleotides downstream stream of the PAM site. In some embodiments, the method does not require a canonical (e.g., NGG) PAM site. In some embodiments, the fusion protein comprises a linker. In some embodiments, the linker is 1-25 amino acids in length. In some embodiments, the linker is 5-20 amino acids in length. In some embodiments, linker is 10, 11, 12, 13, 14, 15, 16, 17, 18, 19, or 20 amino acids in length. In some embodiments, the target region comprises a target window, wherein the target window comprises the target nucleobase pair. In some embodiments, the target window comprises 1-10 nucleotides. In some embodiments, the target window is 1-9, 1-8, 1-7, 1-6, 1-5, 1-4, 1-3, 1-2, or 1 nucleotides in length. In some embodiments, the target window is 1, 2, 3, 4, 5, 6, 7, 8, 9, 10, 11, 12, 13, 14, 15, 16, 17, 18, 19, or 20 nucleotides in length. In some embodiments, the intended edited base pair is within the target window. In some embodiments, the target window comprises the intended edited base pair. In some embodiments, the method is performed using any of the base editors provided herein. In some embodiments, a target window is a deamination window.

[0480] In some embodiments, the disclosure provides methods for editing a nucleotide. In some embodiments, the disclosure provides a method for editing a nucleobase pair of a double-stranded DNA sequence. In some embodiments, the method comprises a) contacting a target region of the double-stranded DNA sequence with a complex comprising a base editor and a guide nucleic acid (e.g., gRNA), where the target region comprises a target nucleobase pair, b) inducing strand separation of said target region, c) converting a first nucleobase of said target nucleobase pair in a single strand of the target region to a second nucleobase, d) excising the second nucleobase, thereby creating an abasic site, and e) replacing a third nucleobase complementary to the first nucleobase base with a fourth nucleobase that is a cytosine (C), thereby generating an intended edited base pair, wherein the efficiency of generating the intended edited base pair is at least 5%. It should be appreciated that in some embodiments, step b is omitted. In some embodiments, at least 5% of the intended base pairs are edited. In some embodiments, at least 10%, 15%, 20%, 25%, 30%, 35%, 40%, 45%, or 50% of the intended base pairs are edited. In some embodiments, the method causes less than 19%, 18%, 16%, 14%, 12%, 10%, 8%, 6%, 4%, 2%, 1%, 0.5%, 0.2%, or less than 0.1% indel formation. In some embodiments, the ratio of intended product to unintended products at the target nucleotide is at least 2:1, 5:1, 10:1, 20:1, 30:1, 40:1, 50:1, 60:1, 70:1, 80:1, 90:1, 100:1, or 200:1, or more. In some embodiments, the ratio of intended point mutation to indel formation is greater than 1:1, 10:1, 50:1, 100:1, 500:1, or 1000:1, or more. In some embodiments, the nicked single strand is hybridized to the guide nucleic acid. In some embodiments, the fusion protein comprises nickase activity. In some embodiments, the intended edited base pair is upstream of a PAM site. In some embodiments, the intended edited base pair is 1, 2, 3, 4, 5, 6, 7, 8, 9, 10, 11, 12, 13, 14, 15, 16, 17, 18, 19, or 20 nucleotides upstream of the PAM site. In some embodiments, the intended edited basepair is downstream of a PAM site. In some embodiments, the intended edited base pair is 1, 2, 3, 4, 5, 6, 7, 8, 9, 10, 11, 12, 13, 14, 15, 16, 17, 18, 19, or 20 nucleotides downstream stream of the PAM site. In some embodiments, the method does not require a canonical (e.g., NGG) PAM site. In some embodiments, the linker is 1-25 amino acids in length. In some embodiments, the linker is 5-20 amino acids in length. In some embodiments, the linker is 10, 11, 12, 13, 14, 15, 16, 17, 18, 19, or 20 amino acids in length. In some embodiments, the target region comprises a target window, wherein the target window comprises the target nucleobase pair. In some embodiments, the target window comprises 1-10 nucleotides. In some embodiments, the target window is 1-9, 1-8, 1-7, 1-6, 1-5, 1-4, 1-3, 1-2, or 1 nucleotides in length. In some embodiments, the target window is 1, 2, 3, 4, 5, 6, 7, 8, 9, 10, 11, 12, 13, 14, 15, 16, 17, 18, 19, or 20 nucleotides in length. In some embodiments, the intended edited base pair occurs within the target window. In some embodiments, the target window comprises the intended edited base pair.

### Reduced Off-Target DNA Editing Effects

[0481] In some aspects, provided herein are base editors and methods of editing DNA by contacting DNA with any of these disclosed base editors that generate (or cause) reduced off-target effects. In various embodiments, methods are designed for determining the off-target editing frequencies of napDNAbp domain-independent (e.g., Cas9-independent), or napDNAbp domain-dependent (e.g., Cas9-dependent), off-target editing events. Editing events may comprise deamination events and excision events mediated by any of the disclosed CGBEs. Off-target deamination events that are dependent on the napDNAbp-guide RNA complex tend to be in sequences that have high sequence identity (e.g., greater than 60% sequence identity) to the target sequence. These types of events arise because of imperfect hybridization of the napDNAbp-guide RNA complex to sequences that share identity with the target sequence. In contrast, off-target events that occur independently of the napDNAbp-guide RNA complex arise as a result of stochastic binding of the base editor to DNA sequences (often sequences that do not share high sequence identity with the target sequence) due to an intrinsic affinity of the base editor of the nucleotide modification domain (e.g., the deaminase domain) of the base editor with DNA. NapDNAbp-independent (e.g., Cas9-independent) editing events arise in particular when the base editor is overexpressed in the system under evaluation, such as a cell or a subject.

[0482] Guide RNA-dependent off-target base editing has been reduced through strategies including installation of mutations that increase DNA specificity into the Cas9 component of base editors, adding 5′ guanosine nucleotides to the sgRNA, or delivery of the base editor as a ribonucleoprotein complex (RNP). Guide RNA-independent off-target editing can arise from binding of the deaminase domain of a base editor to C or A bases in a Cas9-independent manner. The off-target effects of the disclosed base editors may be measured using assays and methods disclosed in and International Application No. PCT/US2020/624628, filed Nov. 25, 2020, incorporated herein by reference. Example 7 below establishes that the disclosed CGBEs exhibit reduced off-target editing relative to their counterpart simple deaminase-nCas9 fusions (i.e., their counterpart cytosine base editors, which lacks any uracil binding proteins). For instance, the RBMX-eA3A-UdgX-HF-nCas9 CGBE exhibited a 52-fold reduced off-target editing relative to the eA3A-nCas9 CBE (see FIGs. 76A and 76B).

[0483] Accordingly, in some embodiments, any of the disclosed base editors exhibit about 3-fold, 4-fold, 4.5-fold, 5-fold, 8-fold, 10-fold, 11-fold, 11.5-fold, 12-fold, 15-fold, 20-fold, 30-fold, 40-fold, 45-fold, 50-fold, 55-fold, or greater than 55-fold reduced average editing frequencies of non-target sequences relative to their counterpart cytosine base editors. In some embodiments, the disclosed base editors have 11.5-fold reduced average editing frequencies of non-target sequences relative to their counterpart cytosine base editors. In some embodiments, any of the disclosed base editors exhibit about 3-fold, 4-fold, 4.5-fold, 5-fold, 8-fold, 10-fold, 11-fold, 11.5-fold, 12-fold, 15-fold, 20-fold, 30-fold, 40-fold, 45-fold, 50-fold, 55-fold, or greater than 55-fold reduced editing at non-target cytosines within the editing window relative to their counterpart cytosine base editors. In some embodiments, any of the disclosed base editors exhibit about 3-fold, 5-fold, 8-fold, 10-fold, 11-fold, 12-fold, 15-fold, 20-fold, 30-fold, 40-fold, 45-fold, 50-fold, or greater than 50-fold reduced average editing frequencies of non-target sequences relative to previously described CGBEs.

[0484] The disclosed CGBEs may exhibit low off-target editing frequencies, and in particular low Cas9-dependent off-target editing frequencies, while exhibiting high on-target editing efficiencies, at one or more genomic loci. The disclosed CGBEs may exhibit low to no clinically relevant off-target effects (e.g., unintended point mutations in clinically relevant exons). In some embodiments, the disclosed base editors cause off-target DNA editing (e.g. at non-target cytosines) frequencies of less than 6%, less than 5%, less than 4%, less than 3%, less than 2%, less than 1.25%, less than 1%, less than 0.75%, less than 0.5%, less than 0.4%, less than 0.25%, less than 0.2%, less than 0.15%, or less than 0.1% (see FIGS. 76A and 76B). The disclosed base editors, and methods of editing that comprise the use of any of these base editors, may provide an on-target cytosine editing efficiency of greater than 50% and a frequency of off-target editing of less than 1.5%.

[0485] In various embodiments, the disclosed editing methods result in an on-target cytosine base editing efficiency of at least about 50%, 60%, 70%, 73%, 75%, 77%, 80%, 82%, 83%, 84%, 80%, 85%, 86%, 88%, 90%, 95%, 98%, or 99% at the target nucleobase pair. The step of contacting may result in in an efficiency of conversion of the C to a G is at least 70%, 73%, 75%, 77%, 80%, 82%, 83%, 84%, 86%, 88%, 90%, 92.5%, 95%, or 98% (see FIG. 72). In particular, the step of contacting may result in on-target base editing efficiencies of greater than 90%.

[0486] In various embodiments, the disclosed editing methods result in a product purity of conversion of the C to a G of at least about 65%, 70%, 73%, 75%, 77%, 80%, 82%, 83%, 84%, 86%, 88%, 90%, 92.5%, or 95%. In some embodiments, the step of contacting may result in a product purity of at least 83%. In some embodiments, the step of contacting may result in a product purity of at least 73%.

### Pharmaceutical Compositions

[0487] Other aspects of the present disclosure relate to pharmaceutical compositions comprising any of the base editors, fusion proteins, or the fusion protein-gRNA complexes described herein. The term “pharmaceutical composition”, as used herein, refers to a composition formulated for pharmaceutical use. In some embodiments, the pharmaceutical composition further comprises a pharmaceutically acceptable carrier. In some embodiments, the pharmaceutical composition comprises additional agents (e.g., for specific delivery, increasing half-life, or other therapeutic compounds).

[0488] As used here, the term “pharmaceutically-acceptable carrier” means a pharmaceutically-acceptable material, composition or vehicle, such as a liquid or solid filler, diluent, excipient, manufacturing aid (e.g., lubricant, talc magnesium, calcium or zinc stearate, or steric acid), or solvent encapsulating material, involved in carrying or transporting the compound from one site (e.g., the delivery site) of the body, to another site (e.g., organ, tissue or portion of the body). A pharmaceutically acceptable carrier is “acceptable” in the sense of being compatible with the other ingredients of the formulation and not injurious to the tissue of the subject (e.g., physiologically compatible, sterile, physiologic pH, etc.). Some examples of materials which can serve as pharmaceutically-acceptable carriers include: (1) sugars, such as lactose, glucose and sucrose; (2) starches, such as corn starch and potato starch; (3) cellulose, and its derivatives, such as sodium carboxymethyl cellulose, methylcellulose, ethyl cellulose, microcrystalline cellulose and cellulose acetate; (4) powdered tragacanth; (5) malt; (6) gelatin; (7) lubricating agents, such as magnesium stearate, sodium lauryl sulfate and talc; (8) excipients, such as cocoa butter and suppository waxes; (9) oils, such as peanut oil, cottonseed oil, safflower oil, sesame oil, olive oil, corn oil and soybean oil; (10) glycols, such as propylene glycol; (11) polyols, such as glycerin, sorbitol, mannitol and polyethylene glycol (PEG); (12) esters, such as ethyl oleate and ethyl laurate; (13) agar; (14) buffering agents, such as magnesium hydroxide and aluminum hydroxide; (15) alginic acid; (16) pyrogen-free water; (17) isotonic saline; (18) Ringer's solution; (19) ethyl alcohol; (20) pH buffered solutions; (21) polyesters, polycarbonates and/or polyanhydrides; (22) bulking agents, such as polypeptides and amino acids (23) serum component, such as serum albumin, HDL and LDL; (22) C2-C12 alcohols, such as ethanol; and (23) other non-toxic compatible substances employed in pharmaceutical formulations. Wetting agents, coloring agents, release agents, coating agents, sweetening agents, flavoring agents, perfuming agents, preservative and antioxidants can also be present in the formulation. The terms such as “excipient”, “carrier”, “pharmaceutically acceptable carrier” or the like are used interchangeably herein.

[0489] In some embodiments, the pharmaceutical composition is formulated for delivery to a subject, e.g., for gene editing. Suitable routes of administrating the pharmaceutical composition described herein include, without limitation: topical, subcutaneous, transdermal, intradermal, intralesional, intraarticular, intraperitoneal, intravesical, transmucosal, gingival, intradental, intracochlear, transtympanic, intraorgan, epidural, intrathecal, intramuscular, intravenous, intravascular, intraosseus, periocular, intratumoral, intracerebral, and intracerebroventricular administration.

[0490] In some embodiments, the pharmaceutical composition described herein is administered locally to a diseased site (e.g., tumor site). In some embodiments, the pharmaceutical composition described herein is administered to a subject by injection, by means of a catheter, by means of a suppository, or by means of an implant, the implant being of a porous, non-porous, or gelatinous material, including a membrane, such as a sialastic membrane, or a fiber.

[0491] In other embodiments, the pharmaceutical composition described herein is delivered in a controlled release system. In one embodiment, a pump may be used (see, e.g., Langer, 1990, Science 249:1527-1533; Sefton, 1989, CRC Crit. Ref. Biomed. Eng. 14:201; Buchwald et al., 1980, Surgery 88:507; Saudek et al., 1989, N. Engl. J. Med. 321:574). In another embodiment, polymeric materials can be used. (See, e.g., Medical Applications of Controlled Release (Langer and Wise eds., CRC Press, Boca Raton, Fla., 1974); Controlled Drug Bioavailability, Drug Product Design and Performance (Smolen and Ball eds., Wiley, New York, 1984); Ranger and Peppas, 1983, Macromol. Sci. Rev. Macromol. Chem. 23:61. See also Levy et al., 1985, Science 228:190; During et al., 1989, Ann. Neurol. 25:351; Howard et al., 1989, J. Neurosurg. 71:105.) Other controlled release systems are discussed, for example, in Langer, supra.

[0492] In some embodiments, the pharmaceutical composition is formulated in accordance with routine procedures as a composition adapted for intravenous or subcutaneous administration to a subject, e.g., a human. In some embodiments, pharmaceutical compositions for administration by injection are solutions in sterile isotonic aqueous buffer. Where necessary, the pharmaceutical can also include a solubilizing agent and a local anesthetic such as lignocaine to ease pain at the site of the injection. Generally, the ingredients are supplied either separately or mixed together in unit dosage form, for example, as a dry lyophilized powder or water free concentrate in a hermetically sealed container such as an ampoule or sachette indicating the quantity of active agent. Where the pharmaceutical is to be administered by infusion, it can be dispensed with an infusion bottle containing sterile pharmaceutical grade water or saline. Where the pharmaceutical composition is administered by injection, an ampoule of sterile water for injection or saline can be provided so that the ingredients can be mixed prior to administration.

[0493] A pharmaceutical composition for systemic administration may be a liquid, e.g., sterile saline, lactated Ringer's or Hank's solution. In addition, the pharmaceutical composition can be in solid forms and re-dissolved or suspended immediately prior to use.

[0494] Lyophilized forms are also contemplated.

[0495] The pharmaceutical composition can be contained within a lipid particle or vesicle, such as a liposome or microcrystal, which is also suitable for parenteral administration. The particles can be of any suitable structure, such as unilamellar or plurilamellar, so long as compositions are contained therein. Compounds can be entrapped in “stabilized plasmid-lipid particles” (SPLP) containing the fusogenic lipid dioleoylphosphatidylethanolamine (DOPE), low levels (5-10 mol %) of cationic lipid, and stabilized by a polyethyleneglycol (PEG) coating (Zhang Y. P. et al., Gene Ther. 1999, 6:1438-47). Positively charged lipids such as N-[1-(2,3-dioleoyloxi)propyl]-N,N,N-trimethyl-amoniummethylsulfate, or “DOTAP,” are particularly preferred for such particles and vesicles. The preparation of such lipid particles is well known. See, e.g., U.S. Pat. Nos. 4,880,635; 4,906,477; 4,911,928; 4,917,951; 4,920,016; and 4,921,757; each of which is incorporated herein by reference.

[0496] The pharmaceutical composition described herein may be administered or packaged as a unit dose, for example. The term “unit dose” when used in reference to a pharmaceutical composition of the present disclosure refers to physically discrete units suitable as unitary dosage for the subject, each unit containing a predetermined quantity of active material calculated to produce the desired therapeutic effect in association with the required diluent; i.e., carrier, or vehicle.

[0497] Further, the pharmaceutical composition can be provided as a pharmaceutical kit comprising (a) a container containing a compound of the invention (e.g., a fusion protein or a base editor) in lyophilized form and (b) a second container containing a pharmaceutically acceptable diluent (e.g., sterile water) for injection. The pharmaceutically acceptable diluent can be used for reconstitution or dilution of the lyophilized compound of the invention. Optionally associated with such container(s) can be a notice in the form prescribed by a governmental agency regulating the manufacture, use or sale of pharmaceuticals or biological products, which notice reflects approval by the agency of manufacture, use or sale for human administration.

[0498] In another aspect, an article of manufacture containing materials useful for the treatment of the diseases described above is included. In some embodiments, the article of manufacture comprises a container and a CGBE. Suitable containers include, for example, bottles, vials, syringes, and test tubes. The containers may be formed from a variety of materials such as glass or plastic. In some embodiments, the container holds a composition that is effective for treating a disease described herein and may have a sterile access port. For example, the container may be an intravenous solution bag or a vial having a stopper pierceable by a hypodermic injection needle. The active agent in the composition is a compound of the invention. In some embodiments, the CGBE on or associated with the container indicates that the composition is used for treating the disease of choice. The article of manufacture may further comprise a second container comprising a pharmaceutically acceptable buffer, such as phosphate-buffered saline, Ringer's solution, or dextrose solution. It may further include other materials desirable from a commercial and user standpoint, including other buffers, diluents, filters, needles, syringes, and package inserts with instructions for use.

### Delivery Methods

[0499] The disclosure also provides methods for delivering an cytosine base editor described herein (e.g., in the form of a base editor as described herein, or a vector or construct encoding same) into a cell. Such methods may involve transducing (e.g., via transfection) cells with a plurality of complexes each comprising a base editor and a gRNA molecule. In some embodiments, the gRNA is bound to the napDNAbp domain (e.g., nCas9 domain) of the base editor. In some embodiments, each gRNA comprises a guide sequence of at least 10 contiguous nucleotides (e.g., 10, 11, 12, 13, 14, 15, 16, 17, 18, 19, 20, 21, 22, 23, 24, 25, 26, 27, 28, 29, or 30 contiguous nucleotides) that is complementary to a target sequence. In certain embodiments, the methods involve the transfection of nucleic acid constructs (e.g., plasmids and mRNA constructs) that each (or together) encode the components of a complex of base editor and gRNA molecule. In certain embodiments, any of the disclosed base editors and a gRNA are administered as a protein:RNA complex, such as a ribonucleoprotein complex. In some embodiments, any of the disclosed base editors are administered as an mRNA construct, along with the gRNA molecule. In particular embodiments, administration to cells is achieved by electroporation or lipofection.

[0500] In certain embodiments of the disclosed methods, a nucleic acid construct (e.g., an mRNA construct) that encodes the base editor is transfected into the cell separately from the construct that encodes the gRNA molecule. In certain embodiments, these components are encoded on a single construct and transfected together. In other embodiments, the methods disclosed herein involve the introduction into cells of a complex comprising a base editor and gRNA molecule that has been expressed and cloned outside of these cells.

[0501] In some aspects, the invention provides methods comprising delivering one or more polynucleotides, such as or one or more vectors as described herein, one or more transcripts thereof, and/or one or proteins transcribed therefrom, to a host cell. In some aspects, the invention further provides cells produced by such methods, and organisms (such as animals, plants, or fungi) comprising or produced from such cells. In some embodiments, a base editor as described herein in combination with (and optionally complexed with) a guide sequence is delivered to a cell.

[0502] In some embodiments, the method of delivery provided comprises nucleofection, microinjection, biolistics, virosomes, liposomes, immunoliposomes, polycation or lipid:nucleic acid conjugates, naked DNA, artificial virions, and agent-enhanced uptake of DNA.

[0503] In another aspect, the disclosure discloses a pharmaceutical composition comprising any one of the presently disclosed vectors. In certain embodiments, the pharmaceutical composition further comprises a pharmaceutically acceptable excipient. In certain embodiments, the pharmaceutical composition further comprises a lipid and/or polymer. In certain embodiments, the lipid and/or polymer is cationic. The preparation of such lipid particles is well known. See, e.g. U.S. Pat. Nos. 4,880,635; 4,906,477; 4,911,928; 4,917,951; 4,920,016; 4,921,757; and 9,737,604, each of which is incorporated herein by reference.

[0504] Exemplary methods of delivery of nucleic acids include lipofection, nucleofection, electoporation (e.g., MaxCyte electroporation), stable genome integration (e.g., piggybac), microinjection, biolistics, virosomes, liposomes, immunoliposomes, polycation or lipid:nucleic acid conjugates, naked DNA, artificial virions, and agent-enhanced uptake of DNA. Lipofection is described in e.g., U.S. Pat. Nos. 5,049,386, 4,946,787; and 4,897,355) and lipofection reagents are sold commercially (e.g., Transfectam™, Lipofectin™ and SF Cell Line 4D-Nucleofector X Kit™ (Lonza)). Cationic and neutral lipids that are suitable for efficient receptor-recognition lipofection of polynucleotides include those of Feigner, WO 91/17424; WO 91/16024. Delivery may be to cells (e.g. in vitro or ex vivo administration) or target tissues (e.g. in vivo administration). Delivery may be achieved through the use of RNP complexes.

[0505] The preparation of lipid:nucleic acid complexes, including targeted liposomes such as immunolipid complexes, is well known to one of skill in the art (see, e.g., Crystal, Science 270:404-410 (1995); Blaese et al., Cancer Gene Ther. 2:291-297 (1995); Behr et al., Bioconjugate Chem. 5:382-389 (1994); Remy et al., Bioconjugate Chem. 5:647-654 (1994); Gao et al., Gene Therapy 2:710-722 (1995); Ahmad et al., Cancer Res. 52:4817-4820 (1992); U.S. Pat. Nos. 4,186,183, 4,217,344, 4,235,871, 4,261,975, 4,485,054, 4,501,728, 4,774,085, 4,837,028, and 4,946,787).

[0506] In other embodiments, the method of delivery and vector provided herein is an RNP complex. RNP delivery of base editors markedly increases the DNA specificity of base editing. RNP delivery of base editors leads to decoupling of on- and off-target DNA editing. RNP delivery ablates off-target editing at non-repetitive sites while maintaining on-target editing comparable to plasmid delivery, and greatly reduces off-target DNA editing even at the highly repetitive VEGFA site 2. See Rees, H. A. et al., Improving the DNA specificity and applicability of base editing through protein engineering and protein delivery, Nat. Commun. 8, 15790 (2017), U.S. Pat. No. 9,526,784, issued Dec. 27, 2016, and U.S. Pat. No. 9,737,604, issued Aug. 22, 2017, each of which is incorporated by reference herein.

[0507] The use of RNA or DNA viral based systems for the delivery of nucleic acids take advantage of highly evolved processes for targeting a virus to specific cells in the body and trafficking the viral payload to the nucleus. Viral vectors can be administered directly to patients (in vivo) or they can be used to treat cells in vitro, and the modified cells may optionally be administered to patients (ex vivo). Conventional viral based systems could include retroviral, lentivirus, adenoviral, adeno-associated and herpes simplex virus vectors for gene transfer. Integration in the host genome is possible with the retrovirus, lentivirus, and adeno-associated virus gene transfer methods, often resulting in long term expression of the inserted transgene. Additionally, high transduction efficiencies have been observed in many different cell types and target tissues.

[0508] The tropism of a viruses can be altered by incorporating foreign envelope proteins, expanding the potential target population of target cells. Lentiviral vectors are retroviral vectors that are able to transduce or infect non-dividing cells and typically produce high viral titers. Selection of a retroviral gene transfer system would therefore depend on the target tissue. Retroviral vectors are comprised of cis-acting long terminal repeats with packaging capacity for up to 6-10 kb of foreign sequence. The minimum cis-acting LTRs are sufficient for replication and packaging of the vectors, which are then used to integrate the therapeutic gene into the target cell to provide permanent transgene expression. Widely used retroviral vectors include those based upon murine leukemia virus (MuLV), gibbon ape leukemia virus (GaLV), Simian Immuno deficiency virus (SIV), human immuno deficiency virus (HIV), and combinations thereof (see, e.g., Buchscher et al., J. Virol. 66:2731-2739 (1992); Johann et al., J. Virol. 66:1635-1640 (1992); Sommnerfelt et al., Virol. 176:58-59 (1990); Wilson et al., J. Virol. 63:2374-2378 (1989); Miller et al., J. Virol. 65:2220-2224 (1991); PCT/US94/05700). In applications where transient expression is preferred, adenoviral based systems may be used. Adenoviral based vectors are capable of very high transduction efficiency in many cell types and do not require cell division. With such vectors, high titer and levels of expression have been obtained. This vector can be produced in large quantities in a relatively simple system. Adeno-associated virus (“AAV”) vectors may also be used to transduce cells with target nucleic acids, e.g., in the in vitro production of nucleic acids and peptides, and for in vivo and ex vivo gene therapy procedures (see, e.g., West et al., Virology 160:38-47 (1987); U.S. Pat. No. 4,797,368; WO 93/24641; Kotin, Human Gene Therapy 5:793-801 (1994); Muzyczka, J. Clin. Invest. 94:1351 (1994). Construction of recombinant AAV vectors are described in a number of publications, including U.S. Pat. No. 5,173,414; Tratschin et al., Mol. Cell. Biol. 5:3251-3260 (1985); Tratschin, et al., Mol. Cell. Biol. 4:2072-2081 (1984); Hermonat & Muzyczka, PNAS 81:6466-6470 (1984); and Samulski et al., J. Virol. 63:03822-3828 (1989).

[0509] Packaging cells are typically used to form virus particles that are capable of infecting a host cell. Such cells include 293 cells, which package adenovirus, and Y² cells or PA317 cells, which package retrovirus. Viral vectors used in gene therapy are usually generated by producing a cell line that packages a nucleic acid vector into a viral particle. The vectors typically contain the minimal viral sequences required for packaging and subsequent integration into a host, other viral sequences being replaced by an expression cassette for the polynucleotide(s) to be expressed. The missing viral functions are typically supplied in trans by the packaging cell line. For example, AAV vectors used in gene therapy typically only possess ITR sequences from the AAV genome which are required for packaging and integration into the host genome. Viral DNA is packaged in a cell line, which contains a helper plasmid encoding the other AAV genes, namely rep and cap, but lacking ITR sequences. The cell line may also be infected with adenovirus as a helper. The helper virus promotes replication of the AAV vector and expression of AAV genes from the helper plasmid. The helper plasmid is not packaged in significant amounts due to a lack of ITR sequences. Contamination with adenovirus can be reduced by, e.g., heat treatment to which adenovirus is more sensitive than AAV. Additional methods for the delivery of nucleic acids to cells are known to those skilled in the art. Reference is made to US 2003/0087817, published May 8, 2003, International Patent Application No. WO 2016/205764, published Dec. 22, 2016, International Patent Application No. WO 2018/071868, published Apr. 19, 2018, U.S. Patent Publication No. 2018/0127780, published May 10, 2018, and International Publication No. WO2020/236982, published Nov. 26, 2020, the disclosures of each of which are incorporated herein by reference.

[0510] In various embodiments, the base editor constructs (including, the split-constructs) may be engineered for delivery in one or more rAAV vectors. An rAAV as related to any of the methods and compositions provided herein may be of any serotype including any derivative or pseudotype (e.g., 1, 2, 3, 4, 5, 6, 7, 8, 9, 10, 11, 12, 13, 2/1, 2/5, 2/8, 2/9, 3/1, 3/5, 3/8, or 3/9). An rAAV may comprise a genetic load (i.e., a recombinant nucleic acid vector that expresses a gene of interest, such as a whole or split base editor that is carried by the rAAV into a cell) that is to be delivered to a cell. An rAAV may be chimeric.

[0511] As used herein, the serotype of an rAAV refers to the serotype of the capsid proteins of the recombinant virus. Non-limiting examples of derivatives and pseudotypes include rAAV2/1, rAAV2/5, rAAV2/8, rAAV2/9, AAV2-AAV3 hybrid, AAVrh.10, AAVrh.74, AAVhu.14, AAV3a/3b, AAVrh32.33, AAV-HSC15, AAV-HSC17, AAVhu.37, AAVrh.8, CHt-P6, AAV2.5, AAV6.2, AAV2i8, AAV-HSC15/17, AAVM41, AAV9.45, AAV6(Y445F/Y731F), AAV2.5T, AAV-HAE1/2, AAV clone 32/83, AAVShH10, AAV2 (Y->F), AAV8 (Y733F), AAV2.15, AAV2.4, AAVM41, and AAVr3.45. A non-limiting example of derivatives and pseudotypes that have chimeric VP1 proteins is rAAV2/5-1VPlu, which has the genome of AAV2, capsid backbone of AAV5 and VPlu of AAV1. Other non-limiting example of derivatives and pseudotypes that have chimeric VP1 proteins are rAAV2/5-8VPlu, rAAV2/9-1VPlu, and rAAV2/9-8VPlu.

[0512] AAV derivatives/pseudotypes, and methods of producing such derivatives/pseudotypes are known in the art (see, e.g., Mol. Ther. 2012 April; 20(4):699-708. doi: 10.1038/mt.2011.287. Epub 2012 Jan. 24. The AAV vector toolkit: poised at the clinical crossroads. Asokan A1, Schaffer D V, Samulski R J.). Methods for producing and using pseudotyped rAAV vectors are known in the art (see, e.g., Duan et al., J. Virol., 75:7662-7671, 2001; Halbert et al., J. Virol., 74:1524-1532, 2000; Zolotukhin et al., Methods, 28:158-167, 2002; and Auricchio et al., Hum. Molec. Genet., 10:3075-3081, 2001).

[0513] Methods of making or packaging rAAV particles are known in the art and reagents are commercially available (see, e.g., Zolotukhin et al. Production and purification of serotype 1, 2, and 5 recombinant adeno-associated viral vectors. Methods 28 (2002) 158-167; and U.S. Patent Publication Numbers US20070015238 and US20120322861, which are incorporated herein by reference; and plasmids and kits available from ATCC and Cell Biolabs, Inc.). For example, a plasmid comprising a gene of interest may be combined with one or more helper plasmids, e.g., that contain a rep gene (e.g., encoding Rep78, Rep68, Rep52 and Rep40) and a cap gene (encoding VP1, VP2, and VP3, including a modified VP2 region as described herein), and transfected into a recombinant cells such that the rAAV particle can be packaged and subsequently purified.

[0514] In some embodiments, the base editors can be divided at a split site and provided as two halves of a whole/complete base editor. The two halves can be delivered to cells (e.g., as expressed proteins or on separate expression vectors) and once in contact inside the cell, the two halves form the complete base editor through the self-splicing action of the inteins on each base editor half. Split intein sequences can be engineered into each of the halves of the encoded base editor to facilitate their transplicing inside the cell and the concomitant restoration of the complete, functioning CGBE.

[0515] These split intein-based methods overcome several barriers to in vivo delivery. For example, the DNA encoding base editors is larger than the recombinant AAV (rAAV) packaging limit, and so requires different solutions. One such solution is formulating the editor fused to split intein pairs that are packaged into two separate rAAV particles that, when co-delivered to a cell, reconstitute the functional editor protein. Several other special considerations to account for the unique features of base editing are described, including the optimization of second-site nicking targets and properly packaging base editors into virus vectors, including lentiviruses and rAAV.

[0516] Accordingly, the disclosure provides dual rAAV vectors and dual rAAV vector particles that comprise expression constructs that encode two halves of any of the disclosed base editors, wherein the encoded base editor is divided between the two halves at a split site. In some embodiments, the two halves may be delivered to cells (e.g., as expressed proteins or on separate expression vectors) and once in contact inside the cell, the two halves form the complete base editor through the self-splicing action of the inteins on each base editor half. Split intein sequences can be engineered into each of the halves of the encoded base editor to facilitate their transplicing inside the cell and the concomitant restoration of the complete, functioning CGBE.

[0517] In various embodiments, the base editors may be engineered as two half proteins (i.e., an CGBE N-terminal half and a CGBE C-terminal half) by “splitting” the whole base editor as a “split site.” The “split site” refers to the location of insertion of split intein sequences (i.e., the N intein and the C intein) between two adjacent amino acid residues in the base editor. More specifically, the “split site” refers to the location of dividing the whole base editor into two separate halves, wherein in each halve is fused at the split site to either the N intein or the C intein motifs. The split site can be at any suitable location in the base editor, but preferably the split site is located at a position that allows for the formation of two half proteins which are appropriately sized for delivery (e.g., by expression vector) and wherein the inteins, which are fused to each half protein at the split site termini, are available to sufficiently interact with one another when one half protein contacts the other half protein inside the cell.

[0518] Additional methods for the delivery of nucleic acids to cells are known to those skilled in the art. See, for example, US Pub. No. 2003/0087817, incorporated herein by reference.

[0519] It should be appreciated that any base editor, e.g., any of the base editors provided herein, may be introduced into the cell in any suitable way, either stably or transiently. In some embodiments, a base editor may be transfected into the cell. In some embodiments, the cell may be transduced or transfected with a nucleic acid construct that encodes a base editor. For example, a cell may be transduced (e.g., with a virus encoding a base editor), or transfected (e.g., with a plasmid encoding a base editor) with a nucleic acid that encodes a base editor, or the translated base editor. Such transduction may be a stable or transient transduction. In some embodiments, cells expressing a base editor or containing a base editor may be transduced or transfected with one or more gRNA molecules, for example when the base editor comprises a Cas9 (e.g., nCas9) domain. In some embodiments, a plasmid expressing a base editor may be introduced into cells through electroporation, transient (e.g., lipofection) and stable genome integration (e.g., piggybac) and viral transduction or other methods known to those of skill in the art.

### Kits and Cells

[0520] Some aspects of this disclosure provide kits comprising a nucleic acid construct comprising a nucleotide sequence encoding a cytosine deaminase capable of deaminating an adenosine in a deoxyribonucleic acid (DNA) molecule. In some embodiments, the nucleotide sequence encodes any of the cytosine deaminases provided herein. In some embodiments, the nucleotide sequence comprises a heterologous promoter that drives expression of the cytosine deaminase. The nucleotide sequence may further comprise a heterologous promoter that drives expression of the gRNA, or a heterologous promoter that drives expression of the base editor and the gRNA.

[0521] In some embodiments, the kit further comprises an expression construct encoding a guide nucleic acid backbone, e.g., a guide RNA backbone, wherein the construct comprises a cloning site positioned to allow the cloning of a nucleic acid sequence identical or complementary to a target sequence into the guide nucleic acid, e.g., guide RNA backbone.

[0522] The disclosure further provides kits comprising a nucleic acid construct, comprising (a) a nucleotide sequence encoding a napDNAbp (e.g., a Cas9 domain) fused to a cytosine deaminase, or a base editor comprising a napDNAbp (e.g., Cas9 domain) and an cytosine deaminase as provided herein; and (b) a heterologous promoter that drives expression of the sequence of (a). In some embodiments, the kit further comprises an expression construct encoding a guide nucleic acid backbone, (e.g., a guide RNA backbone), wherein the construct comprises a cloning site positioned to allow the cloning of a nucleic acid sequence identical or complementary to a target sequence into the guide nucleic acid (e.g., guide RNA backbone).

[0523] Some embodiments of this disclosure provide cells comprising any of the base editors or complexes provided herein. In some embodiments, the cells comprise nucleotide constructs that encodes any of the base editors provided herein. In some embodiments, the cells comprise any of the nucleotides or vectors provided herein. In some embodiments, the cell is a stem cell. In some embodiments, the cell is a mouse embryonic stem cell (mESC). In some embodiments, the cell is a human stem cell, such as a human stem and progenitor cell (HSPC).

[0524] In some embodiments, a host cell is transiently or non-transiently transfected with one or more vectors described herein. In some embodiments, a cell is transfected as it naturally occurs in a subject. In some embodiments, a cell that is transfected is taken from a subject. In some embodiments, the cell is derived from cells taken from a subject, such as a cell line. A wide variety of cell lines for tissue culture are known in the art. In some embodiments, the cell has been removed from a subject and contacted ex vivo with any of the disclosed base editors, complexes, vectors, or polynucleotides.

[0525] In some embodiments, a host cell is transiently or non-transiently transfected with one or more vectors described herein. In some embodiments, a cell is transfected as it naturally occurs in a subject. In some embodiments, a cell that is transfected is taken from a subject. In some embodiments, the cell is derived from cells taken from a subject, such as a cell line. A wide variety of cell lines for tissue culture are known in the art. Examples of cell lines include, but are not limited to, C8161, CCRF-CEM, MOLT, mIMCD-3, NHDF, HeLa-S3, Huh1, Huh4, Huh7, HUVEC, HASMC, HEKn, HEKa, MiaPaCell, Panc1, PC-3, TF1, CTLL-2, C1R, Rat6, CV1, RPTE, A10, T24, J82, A375, ARH-77, Calul, SW480, SW620, SKOV3, SK-UT, CaCo2, P388D1, SEM-K2, WEHI-231, HB56, TIB55, Jurkat, J45.01, LRMB, Bcl-1, BC-3, IC21, DLD2, Raw264.7, NRK, NRK-52E, MRC5, MEF, Hep G2, HeLa B, HeLa T4, COS, COS-1, COS-6, COS-M6A, BS-C-1 monkey kidney epithelial, BALB/3T3 mouse embryo fibroblast, 3T3 Swiss, 3T3-L1, 132-d5 human fetal fibroblasts; 10.1 mouse fibroblasts, 293-T, 3T3, 721, 9L, A2780, A2780ADR, A2780cis, A 172, A20, A253, A431, A-549, ALC, B16, B35, BCP-1 cells, BEAS-2B, bEnd.3, BHK-21, BR 293. BxPC3. C3H-10T1/2, C6/36, Cal-27, CHO, CHO-7, CHO—IR, CHO-K1, CHO-K2, CHO-T, CHO Dhfr −/−, COR-L23, COR-L23/CPR, COR-L23/5010, COR-L23/R23, COS-7, COV-434, CML T1, CMT, CT26, D17, DH82, DU145, DuCaP, EL4, EM2, EM3, EMT6/AR1, EMT6/AR10.0, FM3, H1299, H69, HB54, HB55, HCA2, HEK293, HAP-1, HeLa, Hepalclc7, HL-60, HMEC, HT-29, Jurkat, JY cells, K562 cells, Ku812, KCL22, KG1, KYO1, LNCap, Ma-Mel 1-48, MC-38, MCF-7, MCF-10A, MDA-MB-231, MDA-MB-468, MDA-MB-435, MDCK II, MDCK 11, MOR/0.2R, MONO-MAC 6, MTD-1A, MyEnd, NCI-H69/CPR, NCI-H69/LX10, NCI-H69/LX20, NCI-H69/LX4, NIH-3T3, NALM-1, NW-145, OPCN/OPCT cell lines, Peer, PNT-1A/PNT 2, RenCa, RIN-5F, RMA/RMAS, Saos-2 cells, Sf-9, SkBr3, T2, T-47D, T84, THP1 cell line, U373, U87, U937, VCaP, Vero cells, WM39, WT-49, X63, YAC-1, YAR, and transgenic varieties thereof. Cell lines are available from a variety of sources known to those with skill in the art (see, e.g., the American Type Culture Collection (ATCC) (Manassas, Va.)). In some embodiments, a cell transfected with one or more vectors described herein is used to establish a new cell line comprising one or more vector-derived sequences. In some embodiments, a cell transiently transfected with the components of a CRISPR system as described herein (such as by transient transfection of one or more vectors, or transfection with RNA), and modified through the activity of a CRISPR complex, is used to establish a new cell line comprising cells containing the modification but lacking any other exogenous sequence. In some embodiments, cells transiently or non-transiently transfected with one or more vectors described herein, or cell lines derived from such cells are used in assessing one or more test compounds.

[0526] It should be appreciated that the foregoing concepts, and additional concepts discussed below, may be arranged in any suitable combination, as the present disclosure is not limited in this respect. Further, other advantages and novel features of the present disclosure will become apparent from the following detailed description of various non-limiting embodiments when considered in conjunction with the accompanying figures.

### EXAMPLES

### Cytosine (C) to Guanine (G) Base Editors Through Abasic Site Generation and Engineered Specific Repair

[0527] Sequencing data for the HEK2, RNF2, and FANCF sites is given below. Data presented represents base editing values for the most edited C in the window. This is C6 for HEK2, C6 for RNF2, and C6 for FANCF. The sequences for the three different sites before and after base editing are as follows: HEK2: GAACACAAAGCATAGACTGC (SEQ ID NO: 110) (sequencing reads CTTGTGTTTCGTATCTGACG (SEQ ID NO: 111)); RNF2: GTCATCTTAGTCATTACCTG (SEQ ID NO: 112) (sequencing reads CAGTAGAATCAGTAATGGAC (SEQ ID NO: 113)); and FANCF: GGAATCCCTTCTGCAGCACC (SEQ ID NO: 114) (sequencing reads the same). For both HEK2 and RNF2, the non-target strand was sequenced (this strand contains G's complementary to the target C's). For FANCF the target strand was sequenced (this strand contains the target C's). A schematic for C to T base editing (e.g., using BE3, which is a C to T base editor) and C to G base editing is shown in FIGS. 1 and 2. Certain DNA polymerases are known to replace bases opposite abasic sites with G. One strategy to achieve C to G base editing is to induce the creation of the abasic site, then recruit or tether such a polymerase to replace the G opposite the abasic site with a C. This could provide access to all editors, if C and T can be excised and repaired with all the polymerases based on the polymerases' predetermined base preferences.

[0528] Different fusion constructs are summarized below and are shown in Table 1. UdgX is an isoform of UDG known to bind tightly to uracil with minimal uracil-excision activity. UdgX* is a mutated version of UdgX (Sang et al. NAR, 2015) that was observed to lack uracil excision activity by an in vitro assay in Sang et al. UdgX_On is another mutated version of UdgX (Sang et al. NAR, 2015) observed to have an increased uracil excision activity in the same in vitro assay reported in Sang et al. UDG is the enzyme responsible for the excision of uracil from DNA to create an abasic site. Rev7 is a component of the Rev1/Rev3/Rev7 complex known to incorporate C opposite an abasic site. RevI is the enzymatic component of the above mentioned complex. Polymerases Alpha, Beta, Gamma, Delta, Epsilon, Gamma, Eta, Iota, Kappa, Lambda, Mu, and Nu are eukaryotic polymerases with different preferences for base incorporation opposite an abasic site.

TABLE 1
Construct Reference Key

| Construct | Definition |
|---|---|
| BE3 | Published base editing construct |
| BE3_UdgX | UGI replaced with Uracil binding protein, UdgX |
| BE3_UdgX* | UGI replaced with UdgX isoform with diminished |
| | binding affinity to Uracil |
| BE3_REV7 | UGI replaced with a component of C-integrating |
| | translesion synthesis machinery |
| BE2_UDG | dCas9 based construct (no nicking) where UGI is |
| | replaced with uracil deglycosylase |
| BE3_UDG | UGI is replaced with uracil deglycosylase (BE3) |
| BE2_UdgX_On | dCas9 construct where UGI is replaced with |
| | UdgX with an activating mutation that |
| | increases Uracil excision |
| BE3_UdgX_On | UGI replaced with UdgX with an activating |
| | mutation that increases Uracil excision |
| SMUG1 | UGI replaced with SMUG1, a ssDNA uracil |
| | deglycosylase |

### Constructs Used in the Examples:

[0529] BE3_Full Length—This is a C to T base editor construct comprising a cytidine deaminase, a nCas9, and a uracil glycosylase inhibitor (UGI) domain.

(SEQ ID NO: 115)
MSSETGPVAVDPTLRRRIEPHEFEVFFDPRELRKETCLLYEINWGGRHSIWRHTSQNT
NKHVEVNFIEKFTTERYFCPNTRCSITWFLSWSPCGECSRAITEFLSRYPHVTLFIYIARLYHHA
DPRNRQGLRDLISSGVTIQIMTEQESGYCWRNFVNYSPSNEAHWPRYPHLWVRLYVLELYCII
LGLPPCLNILRRKQPQLTFFTIALQSCHYQRLPPHILWATGLKSGSETPGTSESATPESDKKYSI
GLAIGTNSVGWAVITDEYKVPSKKFKVLGNTDRHSIKKNLIGALLFDSGETAEATRLKRTAR
RRYTRRKNRICYLQEIFSNEMAKVDDSFFHRLEESFLVEEDKKHERHPIFGNIVDEVAYHEKY
PTIYHLRKKLVDSTDKADLRLIYLALAHMIKFRGHFLIEGDLNPDNSDVDKLFIQLVQTYNQL
FEENPINASGVDAKAILSARLSKSRRLENLIAQLPGEKKNGLFGNLIALSLGLTPNFKSNFDLA
EDAKLQLSKDTYDDDLDNLLAQIGDQYADLFLAAKNLSDAILLSDILRVNTEITKAPLSASMI
KRYDEHHQDLTLLKALVRQQLPEKYKEIFFDQSKNGYAGYIDGGASQEEFYKFIKPILEKMD
GTEELLVKLNREDLLRKQRTFDNGSIPHQIHLGELHAILRRQEDFYPFLKDNREKIEKILTFRIP
YYVGPLARGNSRFAWMTRKSEETITPWNFEEVVDKGASAQSFIERMTNFDKNLPNEKVLPK
HSLLYEYFTVYNELTKVKYVTEGMRKPAFLSGEQKKAIVDLLFKTNRKVTVKQLKEDYFKKI
ECFDSVEISGVEDRFNASLGTYHDLLKIIKDKDFLDNEENEDILEDIVLTLTLFEDREMIEERLK
TYAHLFDDKVMKQLKRRRYTGWGRLSRKLINGIRDKQSGKTILDFLKSDGFANRNFMQLIH
DDSLTFKEDIQKAQVSGQGDSLHEHIANLAGSPAIKKGILQTVKVVDELVKVMGRHKPENIVI
EMARENQTTQKGQKNSRERMKRIEEGIKELGSQILKEHPVENTQLQNEKLYLYYLQNGRDM
YVDQELDINRLSDYDVDHIVPQSFLKDDSIDNKVLTRSDKNRGKSDNVPSEEVVKKMKNYW
RQLLNAKLITQRKFDNLTKAERGGLSELDKAGFIKRQLVETRQITKHVAQILDSRMNTKYDE
NDKLIREVKVITLKSKLVSDFRKDFQFYKVREINNYHHAHDAYLNAVVGTALIKKYPKLESE
FVYGDYKVYDVRKMIAKSEQEIGKATAKYFFYSNIMNFFKTEITLANGEIRKRPLIETNGETG
EIVWDKGRDFATVRKVLSMPQVNIVKKTEVQTGGFSKESILPKRNSDKLIARKKDWDPKKY
GGFDSPTVAYSVLVVAKVEKGKSKKLKSVKELLGITIMERSSFEKNPIDFLEAKGYKEVKKD
LIIKLPKYSLFELENGRKRMLASAGELQKGNELALPSKYVNFLYLASHYEKLKGSPEDNEQK
QLFVEQHKHYLDEIIEQISEFSKRVILADANLDKVLSAYNKHRDKPIREQAENIIHLFTLTNLG
APAAFKYFDTTIDRKRYTSTKEVLDATLIHQSITGLYETRIDLSQLGGDSGGSTNLSDIIEKETG
KQLVIQESILMLPEEVEEVIGNKPESDILVHTAYDESTDENVMLLTSDAPEYKPWALVIQDSN
GENKIKMLSGGSPKKKRKV

[0530] BE3_No UGI—This construct is the above BE3 construct, lacking the UGI domain.

(SEQ ID NO: 116)
MSSETGPVAVDPTLRRRIEPHEFEVFFDPRELRKETCLLYEINWGGRHSIWRHTSQNT
NKHVEVNFIEKFTTERYFCPNTRCSITWFLSWSPCGECSRAITEFLSRYPHVTLFIYIARLYHHA
DPRNRQGLRDLISSGVTIQIMTEQESGYCWRNFVNYSPSNEAHWPRYPHLWVRLYVLELYCII
LGLPPCLNILRRKQPQLTFFTIALQSCHYQRLPPHILWATGLKSGSETPGTSESATPESDKKYSI
GLAIGTNSVGWAVITDEYKVPSKKFKVLGNTDRHSIKKNLIGALLFDSGETAEATRLKRTAR
RRYTRRKNRICYLQEIFSNEMAKVDDSFFHRLEESFLVEEDKKHERHPIFGNIVDEVAYHEKY
PTIYHLRKKLVDSTDKADLRLIYLALAHMIKFRGHFLIEGDLNPDNSDVDKLFIQLVQTYNQL
FEENPINASGVDAKAILSARLSKSRRLENLIAQLPGEKKNGLFGNLIALSLGLTPNFKSNFDLA
EDAKLQLSKDTYDDDLDNLLAQIGDQYADLFLAAKNLSDAILLSDILRVNTEITKAPLSASMI
KRYDEHHQDLTLLKALVRQQLPEKYKEIFFDQSKNGYAGYIDGGASQEEFYKFIKPILEKMD
GTEELLVKLNREDLLRKQRTFDNGSIPHQIHLGELHAILRRQEDFYPFLKDNREKIEKILTFRIP
YYVGPLARGNSRFAWMTRKSEETITPWNFEEVVDKGASAQSFIERMTNFDKNLPNEKVLPK
HSLLYEYFTVYNELTKVKYVTEGMRKPAFLSGEQKKAIVDLLFKTNRKVTVKQLKEDYFKKI
ECFDSVEISGVEDRFNASLGTYHDLLKIIKDKDFLDNEENEDILEDIVLTLTLFEDREMIEERLK
TYAHLFDDKVMKQLKRRRYTGWGRLSRKLINGIRDKQSGKTILDFLKSDGFANRNFMQLIH
DDSLTFKEDIQKAQVSGQGDSLHEHIANLAGSPAIKKGILQTVKVVDELVKVMGRHKPENIVI
EMARENQTTQKGQKNSRERMKRIEEGIKELGSQILKEHPVENTQLQNEKLYLYYLQNGRDM
YVDQELDINRLSDYDVDHIVPQSFLKDDSIDNKVLTRSDKNRGKSDNVPSEEVVKKMKNYW
RQLLNAKLITQRKFDNLTKAERGGLSELDKAGFIKRQLVETRQITKHVAQILDSRMNTKYDE
NDKLIREVKVITLKSKLVSDFRKDFQFYKVREINNYHHAHDAYLNAVVGTALIKKYPKLESE
FVYGDYKVYDVRKMIAKSEQEIGKATAKYFFYSNIMNFFKTEITLANGEIRKRPLIETNGETG
EIVWDKGRDFATVRKVLSMPQVNIVKKTEVQTGGFSKESILPKRNSDKLIARKKDWDPKKY
GGFDSPTVAYSVLVVAKVEKGKSKKLKSVKELLGITIMERSSFEKNPIDFLEAKGYKEVKKD
LIIKLPKYSLFELENGRKRMLASAGELQKGNELALPSKYVNFLYLASHYEKLKGSPEDNEQK
QLFVEQHKHYLDEIIEQISEFSKRVILADANLDKVLSAYNKHRDKPIREQAENIIHLFTLTNLG
APAAFKYFDTTIDRKRYTSTKEVLDATLIHQSITGLYETRIDLSQLGGD

[0531] Cas9 Nickase Sequence—Used in BE3.

(SEQ ID NO: 21)
MDKKYSIGLAIGTNSVGWAVITDEYKVPSKKFKVLGNTDRHSIKKNLIGALLFDSGET
AEATRLKRTARRRYTRRKNRICYLQEIFSNEMAKVDDSFFHRLEESFLVEEDKKHERHPIFGN
IVDEVAYHEKYPTIYHLRKKLVDSTDKADLRLIYLALAHMIKFRGHFLIEGDLNPDNSDVDKL
FIQLVQTYNQLFEENPINASGVDAKAILSARLSKSRRLENLIAQLPGEKKNGLFGNLIALSLGL
TPNFKSNFDLAEDAKLQLSKDTYDDDLDNLLAQIGDQYADLFLAAKNLSDAILLSDILRVNT
EITKAPLSASMIKRYDEHHQDLTLLKALVRQQLPEKYKEIFFDQSKNGYAGYIDGGASQEEFY
KFIKPILEKMDGTEELLVKLNREDLLRKQRTFDNGSIPHQIHLGELHAILRRQEDFYPFLKDNR
EKIEKILTFRIPYYVGPLARGNSRFAWMTRKSEETITPWNFEEVVDKGASAQSFIERMTNFDK
NLPNEKVLPKHSLLYEYFTVYNELTKVKYVTEGMRKPAFLSGEQKKAIVDLLFKTNRKVTV
KQLKEDYFKKIECFDSVEISGVEDRFNASLGTYHDLLKIIKDKDFLDNEENEDILEDIVLTLTLF
EDREMIEERLKTYAHLFDDKVMKQLKRRRYTGWGRLSRKLINGIRDKQSGKTILDFLKSDGF
ANRNFMQLIHDDSLTFKEDIQKAQVSGQGDSLHEHIANLAGSPAIKKGILQTVKVVDELVKV
MGRHKPENIVIEMARENQTTQKGQKNSRERMKRIEEGIKELGSQILKEHPVENTQLQNEKLY
LYYLQNGRDMYVDQELDINRLSDYDVDHIVPQSFLKDDSIDNKVLTRSDKNRGKSDNVPSEE
VVKKMKNYWRQLLNAKLITQRKFDNLTKAERGGLSELDKAGFIKRQLVETRQITKHVAQIL
DSRMNTKYDENDKLIREVKVITLKSKLVSDFRKDFQFYKVREINNYHHAHDAYLNAVVGTA
LIKKYPKLESEFVYGDYKVYDVRKMIAKSEQEIGKATAKYFFYSNIMNFFKTEITLANGEIRK
RPLIETNGETGEIVWDKGRDFATVRKVLSMPQVNIVKKTEVQTGGFSKESILPKRNSDKLIAR
KKDWDPKKYGGFDSPTVAYSVLVVAKVEKGKSKKLKSVKELLGITIMERSSFEKNPIDFLEA
KGYKEVKKDLIIKLPKYSLFELENGRKRMLASAGELQKGNELALPSKYVNFLYLASHYEKLK
GSPEDNEQKQLFVEQHKHYLDEIIEQISEFSKRVILADANLDKVLSAYNKHRDKPIREQAENII
HLFTLTNLGAPAAFKYFDTTIDRKRYTSTKEVLDATLIHQSITGLYETRIDLSQLGGD

[0532] dCas9 Sequence—Used in BE2

(SEQ ID NO: 22)
MDKKYSIGLAIGTNSVGWAVITDEYKVPSKKFKVLGNTDRHSIKKNLIGALLFDSGET
AEATRLKRTARRRYTRRKNRICYLQEIFSNEMAKVDDSFFHRLEESFLVEEDKKHERHPIFGN
IVDEVAYHEKYPTIYHLRKKLVDSTDKADLRLIYLALAHMIKFRGHFLIEGDLNPDNSDVDKL
FIQLVQTYNQLFEENPINASGVDAKAILSARLSKSRRLENLIAQLPGEKKNGLFGNLIALSLGL
TPNFKSNFDLAEDAKLQLSKDTYDDDLDNLLAQIGDQYADLFLAAKNLSDAILLSDILRVNT
EITKAPLSASMIKRYDEHHQDLTLLKALVRQQLPEKYKEIFFDQSKNGYAGYIDGGASQEEFY
KFIKPILEKMDGTEELLVKLNREDLLRKQRTFDNGSIPHQIHLGELHAILRRQEDFYPFLKDNR
EKIEKILTFRIPYYVGPLARGNSRFAWMTRKSEETITPWNFEEVVDKGASAQSFIERMTNFDK
NLPNEKVLPKHSLLYEYFTVYNELTKVKYVTEGMRKPAFLSGEQKKAIVDLLFKTNRKVTV
KQLKEDYFKKIECFDSVEISGVEDRFNASLGTYHDLLKIIKDKDFLDNEENEDILEDIVLTLTLF
EDREMIEERLKTYAHLFDDKVMKQLKRRRYTGWGRLSRKLINGIRDKQSGKTILDFLKSDGF
ANRNFMQLIHDDSLTFKEDIQKAQVSGQGDSLHEHIANLAGSPAIKKGILQTVKVVDELVKV
MGRHKPENIVIEMARENQTTQKGQKNSRERMKRIEEGIKELGSQILKEHPVENTQLQNEKLY
LYYLQNGRDMYVDQELDINRLSDYDVDAIVPQSFLKDDSIDNKVLTRSDKNRGKSDNVPSEE
VVKKMKNYWRQLLNAKLITQRKFDNLTKAERGGLSELDKAGFIKRQLVETRQITKHVAQIL
DSRMNTKYDENDKLIREVKVITLKSKLVSDFRKDFQFYKVREINNYHHAHDAYLNAVVGTA
LIKKYPKLESEFVYGDYKVYDVRKMIAKSEQEIGKATAKYFFYSNIMNFFKTEITLANGEIRK
RPLIETNGETGEIVWDKGRDFATVRKVLSMPQVNIVKKTEVQTGGFSKESILPKRNSDKLIAR
KKDWDPKKYGGFDSPTVAYSVLVVAKVEKGKSKKLKSVKELLGITIMERSSFEKNPIDFLEA
KGYKEVKKDLIIKLPKYSLFELENGRKRMLASAGELQKGNELALPSKYVNFLYLASHYEKLK
GSPEDNEQKQLFVEQHKHYLDEIIEQISEFSKRVILADANLDKVLSAYNKHRDKPIREQAENII
HLFTLTNLGAPAAFKYFDTTIDRKRYTSTKEVLDATLIHQSITGLYETRIDLSQLGGD

[0533] BE3_Replace UGI with UDG, UdgX variants, Polymerases—In the below construct, the NLS sequence is identified by underlining and linkers are identified in italics. The “[UGI]” indicated in the sequence below identifies the location where UDG, UDG variants (e.g., UDG, UdgX* (R107S), and UdgX_On (H109S)), Rev7, and Smug1, were inserted (rather than the UGI of BE3). The “[Polymerase]” indicated in the sequence below identifies the location where polymerases (e.g., Pol Beta, Pol Lambda, Pol Eta, Pol Mu, Pol Iota, Pol Kappa, Pol Alpha, Pol Delta, Pol Gamma, and Pol Nu), and Rev1 were inserted.

(SEQ ID NO: 117)
MSSETGPVAVDPTLRRRIEPHEFEVFFDPRELRKETCLLYEINWGGRHSIWRHTSQNT
NKHVEVNFIEKFTTERYFCPNTRCSITWFLSWSPCGECSRAITEFLSRYPHVTLFIYIARLYHHA
DPRNRQGLRDLISSGVTIQIMTEQESGYCWRNFVNYSPSNEAHWPRYPHLWVRLYVLELYCII
LGLPPCLNILRRKQPQLTFFTIALQSCHYQRLPPHILWATGLKSGSETPGTSESATPESDKKYSI
GLAIGTNSVGWAVITDEYKVPSKKFKVLGNTDRHSIKKNLIGALLFDSGETAEATRLKRTAR
RRYTRRKNRICYLQEIFSNEMAKVDDSFFHRLEESFLVEEDKKHERHPIFGNIVDEVAYHEKY
PTIYHLRKKLVDSTDKADLRLIYLALAHMIKFRGHFLIEGDLNPDNSDVDKLFIQLVQTYNQL
FEENPINASGVDAKAILSARLSKSRRLENLIAQLPGEKKNGLFGNLIALSLGLTPNFKSNFDLA
EDAKLQLSKDTYDDDLDNLLAQIGDQYADLFLAAKNLSDAILLSDILRVNTEITKAPLSASMI
KRYDEHHQDLTLLKALVRQQLPEKYKEIFFDQSKNGYAGYIDGGASQEEFYKFIKPILEKMD
GTEELLVKLNREDLLRKQRTFDNGSIPHQIHLGELHAILRRQEDFYPFLKDNREKIEKILTFRIP
YYVGPLARGNSRFAWMTRKSEETITPWNFEEVVDKGASAQSFIERMTNFDKNLPNEKVLPK
HSLLYEYFTVYNELTKVKYVTEGMRKPAFLSGEQKKAIVDLLFKTNRKVTVKQLKEDYFKKI
ECFDSVEISGVEDRFNASLGTYHDLLKIIKDKDFLDNEENEDILEDIVLTLTLFEDREMIEERLK
TYAHLFDDKVMKQLKRRRYTGWGRLSRKLINGIRDKQSGKTILDFLKSDGFANRNFMQLIH
DDSLTFKEDIQKAQVSGQGDSLHEHIANLAGSPAIKKGILQTVKVVDELVKVMGRHKPENIVI
EMARENQTTQKGQKNSRERMKRIEEGIKELGSQILKEHPVENTQLQNEKLYLYYLQNGRDM
YVDQELDINRLSDYDVDHIVPQSFLKDDSIDNKVLTRSDKNRGKSDNVPSEEVVKKMKNYW
RQLLNAKLITQRKFDNLTKAERGGLSELDKAGFIKRQLVETRQITKHVAQILDSRMNTKYDE
NDKLIREVKVITLKSKLVSDFRKDFQFYKVREINNYHHAHDAYLNAVVGTALIKKYPKLESE
FVYGDYKVYDVRKMIAKSEQEIGKATAKYFFYSNIMNFFKTEITLANGEIRKRPLIETNGETG
EIVWDKGRDFATVRKVLSMPQVNIVKKTEVQTGGFSKESILPKRNSDKLQNEKLYLYYLQN
GRDMYVDQELDINRLSDYDVDHIVPQSFLKDDSIDNKVLTRSDKNRGKSDNVPSEEVVKKM
KNYWRQLLNAKLITQRKFDNLTKAERGGLSELDKAGFIKRQLVETRQITKHVAQILDSRMNT
KYDENDKLIREVKVITLKSKLVSDFRKDFQFYKVREINNYHHAHDAYLNAVVGTALIKKYPK
LESEFVYGDYKVYDVRKMIAKSEQEIGKATAKYFFYSNIMNFFKTEITLANGEIRKRPLIETNG
ETGEIVWDKGRDFATVRKVLSMPQVNIVKKTEVQTGGFSKESILPKRNSDKLIARKKDWDPK
KYGGFDSPTVAYSVLVVAKVEKGKSKKLKSVKELLGITIMERSSFEKNPIDFLEAKGYKEVK
KDLIIKLPKYSLFELENGRKRMLASAGELQKGNELALPSKYVNFLYLASHYEKLKGSPEDNE
QKQLFVEQHKHYLDEIIEQISEFSKRVILADANLDKVLSAYNKHRDKPIREQAENIIHLFTLTN
LGAPAAFKYFDTTIDRKRYTSTKEVLDATLIHQSITGLYETRIDLSQLGGDSGGS
[UGI]
(SEQ ID NO: 120)
SGGSGGSGGS
[Polymerase]
(SEQ ID NO: 41)
PKKKRKV

[0534] N-terminal UDG (insert UDG (Tyr147Ala) or UDG (Asn204Asp))+Cas9 nickase and Polymerase at C-terminus—In the below construct, the NLS sequence is identified by underlining and linkers are identified in italics. The “[UDGvariants]” indicated in the sequence below identifies the location where UDG Tyr147Ala and UDG Asn204Asp, were inserted. The “[Polymerase]” indicated in the sequence below identifies the location where polymerases (e.g., Pol Beta, Pol Lambda, Pol Eta, Pol Mu, Pol Iota, Pol Kappa, Pol Alpha, Pol Delta, Pol Gamma, and Pol Nu), and Rev1 were inserted.

[UDGvariants]
(SEQ ID NO: 118)
SETPGTSESATPESDKKYSIGLAIGTNSVGWAVITDEYKVPSKKFKVL
GNTDRHSIKKNLIGALLFDSGETAEATRLKRTARRRYTRRKNRICYLQEIFSNEMAKVDDSFF
HRLEESFLVEEDKKHERHPIFGNIVDEVAYHEKYPTIYHLRKKLVDSTDKADLRLIYLALAHM
IKFRGHFLIEGDLNPDNSDVDKLFIQLVQTYNQLFEENPINASGVDAKAILSARLSKSRRLENLI
AQLPGEKKNGLFGNLIALSLGLTPNFKSNFDLAEDAKLQLSKDTYDDDLDNLLAQIGDQYAD
LFLAAKNLSDAILLSDILRVNTEITKAPLSASMIKRYDEHHQDLTLLKALVRQQLPEKYKEIFF
DQSKNGYAGYIDGGASQEEFYKFIKPILEKMDGTEELLVKLNREDLLRKQRTFDNGSIPHQIH
LGELHAILRRQEDFYPFLKDNREKIEKILTFRIPYYVGPLARGNSRFAWMTRKSEETITPWNFE
EVVDKGASAQSFIERMTNFDKNLPNEKVLPKHSLLYEYFTVYNELTKVKYVTEGMRKPAFLS
GEQKKAIVDLLFKTNRKVTVKQLKEDYFKKIECFDSVEISGVEDRFNASLGTYHDLLKIIKDK
DFLDNEENEDILEDIVLTLTLFEDREMIEERLKTYAHLFDDKVMKQLKRRRYTGWGRLSRKLI
NGIRDKQSGKTILDFLKSDGFANRNFMQLIHDDSLTFKEDIQKAQVSGQGDSLHEHIANLAGS
PAIKKGILQTVKVVDELVKVMGRHKPENIVIEMARENQTTQKGQKNSRERMKRIEEGIKELG
SQILKEHPVENTQLQNEKLYLYYLQNGRDMYVDQELDINRLSDYDVDHIVPQSFLKDDSIDN
KVLTRSDKNRGKSDNVPSEEVVKKMKNYWRQLLNAKLITQRKFDNLTKAERGGLSELDKA
GFIKRQLVETRQITKHVAQILDSRMNTKYDENDKLIREVKVITLKSKLVSDFRKDFQFYKVRE
INNYHHAHDAYLNAVVGTALIKKYPKLESEFVYGDYKVYDVRKMIAKSEQEIGKATAKYFF
YSNIMNFFKTEITLANGEIRKRPLIETNGETGEIVWDKGRDFATVRKVLSMPQVNIVKKTEVQ
TGGFSKESILPKRNSDKLIARKKDWDPKKYGGFDSPTVAYSVLVVAKVEKGKSKKLKSVKEL
LGITIMERSSFEKNPIDFLEAKGYKEVKKDLIIKLPKYSLFELENGRKRMLASAGELQKGNELA
LPSKYVNFLYLASHYEKLKGSPEDNEQKQLFVEQHKHYLDEIIEQISEFSKRVILADANLDKV
LSAYNKHRDKPIREQAENIIHLFTLTNLGAPAAFKYFDTTIDRKRYTSTKEVLDATLIHQSITG
LYETRIDLSQLGGD
(SEQ ID NO: 103)
SGGS
[Polymerase]
(SEQ ID NO: 41)
PKKKRKV

### Example 1: C to G Approach 1—Increase Abasic Site Formation

[0535] If an abasic site is more efficiently generated, it is expected that the total flux through the C to G base editing pathway will be increased. A schematic representation of base editors used in this approach is shown in FIGS. 3 and 4. Using UdgX, an orthologue of UDG identified to bind tightly to Uracil with minimal uracil excising activity, increases the amount of C to G editing. Without wishing to be bound by any particular theory, UdgX near-covalent binding to U mimics a lesion that instigates translesion polymerase-type repair.

[0536] Further, UdgX has a low level catalytic activity which, in combination with tight binding, excises the U and leads to abasic site formation. Abasic site formation allows for off-target products and preferential generation of this lesion leads to more product. This is supported through different experiments and base editors, which are illustrated in FIGS. 5 and 6.

[0537] The results of C to G base editing at HEK2, RNF2, and FANCF sites in WT cells using seven base editors (BE3; BE3_UdgX; BE3_UdgX*; BE2_UdgX_On; BE3_UdgX_On; BE2_UDG; and BE3_UDG) are shown in FIGS. 7 through 15. These figures show the results for C to G editing at the most edited position (C6) at the three representative sites that have high, medium, and low tolerance to sequence perturbation from standard C to T editing.

[0538] Results of C to G base editing at HEK2, RNF2, and FANCF sites in UDG−/− cells using various C to G base editors (BE3; BE3_UdgX; BE2_UNG; BE3_UNG; BE2UdgX_On; BE3UdgX_On; and SMUG1) are shown in FIGS. 16 through 24.

[0539] Results of C to G base editing at HEK2, RNF2, and FANCF sites in REV1^{-/-} cells using various C to G base editors (BE3; BE3_UdgX; BE2_UNG; BE3_UNG; BE2UdgX_On; BE3UdgX_On; and SMUG1) are shown in FIGS. 25 through 30.

[0540] Results of C to G base editing at HEK2, RNF2, and FANCF sites in the three respective cell types (WT, UDG−/−, and REV1−/− cells) using various C to G base editors (BE3; BE3_UdgX; BE2_UNG; BE3_UNG; BE2UdgX_On; BE3UdgX_On; and SMUG1) are summarized in FIGS. 31 and 32.

### Example 2: C to G Approach 2—Increase C Incorporation Opposite an Abasic Site

[0541] An increase in the preference for C integration opposite an abasic site should lead to an increase in total C to G base editing. A schematic for this approach and base editors used in this approach is illustrated in FIGS. 33 and 34. Various polymerases that can be used in this approach for C to G base editing are shown in FIG. 35. Briefly Abasic site generation leads to C to non-T product formation. Rev1 has dC transferase activity. Eliminating this pathway or altering how abasic lesions are repaired should lead to new base editors. Rev1−/− knockout cell lines should lack C to G editing if this pathway is solely responsible for formation of this product. The fusion of various polymerases should lead to repair of the opposite strand based on polymerase preference for repair opposite an abasic sites leading to increased C to G base editing. Exemplary base editors are illustrated in FIG. 36.

[0542] Results of C to G base editing at HEK2, RNF2, and FANCF sites in WT cells using various base editors (BE3; BE3_UdgX; BE2_UdgX_On; BE3_UdgX_On; BE2_UDG; and BE3_UDG) are shown in FIGS. 37 through 39.

[0543] Steady-state Kinetic parameters for one-base incorporation opposite an abasic site and G by human polymerases f, t, x, and REV1 are given in Table 2. See, Choi et al. J mol Bio. 2010).

TABLE 2
Steady-state Kinetic parameters for polymerases η, ι, κ, and REV1

| Poly- | | | | | k_{cat}/Kₘ | dNTP | Relative |
|---|---|---|---|---|---|---|---|
| merase | Template | dNTP | Kₘ (μM) | k_{cat} (s⁻¹) | (mM⁻¹ s⁻¹) | selectivity ratio^{a} | efficiency^{b} |
| η | AP site | A | 40 ± 6 | 0.12 ± 0.004 | 3.0 | 0.95 | 0.065 |
| | | T | 290 ± 50 | 0.92 ± 0.05 | 3.2 | 1 | 0.070 |
| | | G | 8.5 ± 1.0 | 0.005 ± 0.0001 | 0.59 | 0.19 | 0.013 |
| | | C | 210 ± 20 | 0.14 ± 0.01 | 0.67 | 0.21 | 0.015 |
| | G | C | 2.6 ± 0.1 | 0.12 ± 0.005 | 46 | | 1 |
| ι | AP site | A | 210 ± 40 | 0.54 ± 0.04 | 2.6 | 0.45 | 1.4 |
| | | T | 130 ± 20 | 0.74 ± 0.02 | 5.7 | 1 | 3.0 |
| | | G | 120 ± 10 | 0.47 ± 0.01 | 3.9 | 0.69 | 2.1 |
| | | C | 570 ± 140 | 0.77 ± 0.05 | 1.4 | 0.24 | 0.74 |
| | G | C | 300 ± 30 | 0.57 ± 8.02 | 1.9 | | 1 |
| κ | AP site | A | 1600 ± 200 | 0.077 ± 0.005 | 0.048 | 0.77 | 0.00065 |
| | | T | 2300 ± 700 | 0.017 ± 0.002 | 0.0074 | 0.12 | 0.00010 |
| | | G | 400 ± 70 | 0.0032 ± 0.0002 | 0.008 | 0.13 | 0.00011 |
| | | C | 780 ± 220 | 0.049 ± 0.005 | 0.063 | 1 | 0.00085 |
| | G | C | 3.8 ± 0.5 | 0.28 ± 0.01 | 74 | | 1 |
| REV1 | AP site | A | 140 ± 50 | 0.000025 ± 0.000002 | 0.00018 | 0.8031 | 0.00019 |
| | | T | 190 ± 30 | 0.000072 ± 0.000003 | 0.00038 | 0.0067 | 0.00040 |
| | | G | 190 ± 50 | 0.000031 ± 0.000003 | 0.00016 | 0.0029 | 0.00017 |
| | | C | 210 ± 30 | 0.012 ± 0.001 | 0.057 | 1 | 0.061 |
| | G | C | 12.8 ± 50 | 0.012 ± 0.0003 | 0.94 | | 1 |

^{a}dNTP selectivity ratio, calculated by dividing k_{cat}/Kₘ for each dNTP incorporation by the highest k_{cat}/Kₘ for dNTP incorporation opposite AP site.
bRelative efficiency, calculated by divifing k_{cat}/K_{m f}or each dNTP incorporation opposite AP site by k_{cat}/Kₘ for dCTP incorporation opposite G.

[0544] Steady-state kinetic parameters for one-base incorporation opposite an abasic site and G by human polymerases a and 6/PCNA are given in Table 3.

TABLE 3
Steady-state Kinetic parameters for polymerase α and δ/PCNA
Steady-state kinetic parameters for one-base incorporation opposite an AP site and G by human pols α and δ/PCNA

| Poly- | | | | | k_{cat}/Kₘ | dNTP | Relative |
|---|---|---|---|---|---|---|---|
| merase | Template | dNTP | Kₘ (μM) | k_{cat} (s⁻¹) | (mM⁻¹ s⁻¹) | selectivity ratio^{a} | efficiency^{b} |
| α | AP site | A | 570 ± 100 | 0.0083 ± 0.0001 | 0.015 | 1 | 0.0010 |
| | | T | 250 ± 60 | 0.00046 ± 0.00003 | 0.0018 | 0.12 | 0.00012 |
| | | G | 550 ± 120 | 0.00024 ± 0.00002 | 0.0004 | 0.027 | 0.00003 |
| | | C | 980 ± 50 | 0.00047 ± 0.000001 | 0.0005 | 0.033 | 0.00003 |
| | G | C | 0.42 ± 0.09 | 0.0064 ± 0.0003 | 15 | 1 | 1 |
| δ/PCNA | AP site | A | 25 ± 6 | 0.0067 ± 0.0004 | 0.27 | 0.36 | 0.012 |
| | | T | 62 ± 16 | 0.0060 ± 0.0004 | 0.097 | 0.34 | 0.0044 |
| | | G | 110 ± 20 | 0.010 ± 0.001 | 0.091 | 0.029 | 0.0041 |
| | | C | 880 ± 160 | 0.0069 ± 0.0006 | 0.0078 | | 0.0004 |
| | G | C | 0.27 ± 0.05 | 0.0059 ± 0.0002 | 22 | | 1 |

^{a}dNTP selectivity ratio, calculated by dividing k_{cat}/Kₘ for each dNTP incorporation by the highest k_{cat}/Kₘ for dNTP incorporation opposite AP site.
bRelative efficiency, calculated by dividing k_{cat}/Kₘ for each dNTP incorporation opposite AP site by k_{cat}/Kₘ for dCTP incorporation opposite G.

TABLE 4
Polymerases that can be used for base editing approach 2.

| | |
|---|---|
| Polymerase | Size (Amino Acids) |

Family X

| | |
|---|---|
| Beta | 335 |
| Lambda | 575 |
| Mu | 494 |

Family B

| | |
|---|---|
| Alpha | 1462 |
| Delta | 1107 |
| Epsilon | 2286 |

Family Y

| | |
|---|---|
| Eta | 713 |
| Iota | 740 |
| Kappa | 870 |
| Rev1 | 1251 |
| Zeta (Rev3/Rev7) | 3130 |

### Example 3: C to G Approach 3—Increase Both Abasic Site Formation and C Incorporation

[0545] A schematic of a base editor for increasing both abasic site formation and C incorporation for increased C to G base editing is illustrated in FIG. 40. Addition of polymerase tethered constructs, particularly Pol Kappa, increases C to G base editing. Results of base editing at the HEK2, RNF2, and FANCF sites using either Pol Kappa for Pol Iota tethered constructs is shown in FIG. 41. Results of base editing using additional polymerase tethered constructs in WT cells at cytosine residues in the HEK2, RNF2, and FANCF sites are shown in FIGS. 42 through 47. UDG 147 is an enzyme that directly removes T and increases the C to G base editing (FIGS. 42 through 44), while UDG 204 is an enzyme that directly removes C and increases C to G base editing (FIGS. 45 through 47).

### Example 4: C to G Approach 4—Eliminate Alternative Repair Pathways to Increase C to G Flux

[0546] One way to improve C to G editing is to eliminate or downmodulate alternative repair pathways. AS one example, eliminating the repair pathway protein MSH2^{-/-} may lead to an increase in C to G base editing is shown in FIG. 48. The results of C to G base editing at HEK2, RNF2, and FANCF sites in MSH2^{-/-} cells using various base editors (BE3; BE3_UdgX; BE2_UdgX_On; BE3_UdgX_On; BE2_UDG; and BE3_UDG) are shown in FIGS. 49 through 51.

### Example 5: C to G Approach 5—Expression of Components in Trans

[0547] One approach for identifying base editor components that function together is to express those components together in a cell, in trans. Once base editor components (e.g., polymerases, uracil binding proteins, base excision enzymes, cytidine deaminases, and/or nucleic acid programmable DNA binding proteins) that induce C to G mutations are identified, they can be tethered to generate base editors. Expressed UDG and UdgX variants fused to APOBEC-Cas9 nickase and simultaneously overexpressed TLS polymerases in trans lead to C to G editing at the RNF2 site. A schematic illustrating the expression of components in trans is shown in FIG. 52.

[0548] Results of base editing at HEK2, RNF2, and FANCF in HEK293 cells using five different base editors (BE3; BE3_UdgX; BE2_UdgX_On; BE3_UdgX_On; BE2_UDG; and BE3_UDG) expressed, in trans, with various polymerases (Pol Kappa, Pol Eta, Pol Iota, REV1, Pol Beta, and Pol Delta) are shown in FIGS. 53 through 55.

### REFERENCES FOR EXAMPLES 1-5

[0549] 1. Chan, K., Resnick, M. A., Gordenin, D. A. The choice of nucleotide inserted opposite abasic sites formed within chromosomal DNA reveals the polymerase activities participating in translesion DNA synthesis. DNA Repair 12, 878-889 (2013).
[0550] 2. Choi, J. Y., Lim, S., Kim, E. J., Jo, A., and Guengerich F. P. Translesion synthesis across abasic lesions by human B-family and Y-family DNA polymerases alpha, delta, eta, iota, kappa, and Rev 1. Journal of Molecular Biology 404, 34-44 (2010).
[0551] 3. Dianov, G. L. and Hubsher U. Mammalian base excision repair: the forgotten archangel. Nucleic Acids Research, 1-8 (2013).
[0552] 4. Fortini, P., Pasucci, B., Sobol, R. W., Wilson, S. H., and Dogliotti, E. Different DNA polymerases are involved in the Short- and lon-patch base excision repair in mammalian cells. Biochemistry 37, 3575-3580 (1998).
[0553] 5. Jiricny, J. The multifaceted mismatch-repair system. Nature Rev. Molecular Cell Biology 7, 335-346 (2006).
[0554] 6. Katafuchi A. and Nohmi T. DNA polymerases involved in the incorporation of oxidized nucelotides into DNA: their efficiency and template base preference. Mutation Research 703, 24-31 (2010).
[0555] 7. Kavli, B., Slupphaug, G., Mol, C. D., Arvai, A. S., Peterson, S. B., Tainer, J. A., and Krokan, E. H. Excision of cytosine and thymine from DNA by mutants of human uracil-DNA glycosylase. EMBO 15, 3442-3447 (1996).
[0556] 8. Krokan, H. E. and Bjoras, M. Base Excision Repair, Cold Spring Harbor Perspectives in Biology, 1-22 (2013).
[0557] 9. Kunkel, T. A. and Erie, D. A. Eukaryotic mismatch repair in relation to RNA replication. Annual Reviews Genetics 49, 291-313 (2015).
[0558] 10. Li, G. M. Mechanisms and functions of DNA mismatch repair. Cell Research 18, 85-98 (2008).
[0559] 11. Lin, W., Xin, H., Wu, X., Yuan, F., and Wang, Z. The human REV1 gene codes for a DNA template-dependent dCMP transferase. Nucleic Acids Research 27, 4468-4475 (1999).
[0560] 12. Mol, C. D., Arvai, A. S., Slupphaug, G., Kavil, B., Alseth, I., Krokan, H. E., and Tainer, J. A. Crystal structure and mutational analysis of human uracil-DNA glycosylase: structural basis for specificity and catalysis. Cell 80, 869-878 (1995).
[0561] 13. Prasad, R., Poltoratsky, V., Hou, E. W., and Wilson, S. H. Rev1 is a base excision repair enzyme with 5′deoxyribose phosphate lyase activity. Nucleic Acid Research, 1-10 (2016).
[0562] 14. Robertson, A. B., Klungland, A., Rognes, T., and Leiros, I. Base excision repair: the long and the short of it. Cell Molecular Life Sciences 66, 981-993 (2009).
[0563] 15. Sale, J. E., Lehmann, A. R., and Woodgate, R. Y-Family DNA polymerases and their role in tolerance of cellular DNA damage. Nature Rev. Molecular Cell Biology 13, 141-152 (2012).
[0564] 16. Sang, P. B., Srinath, T., Patil, A. G., Woo, E. J., and Varshney, U. A unique uracil-DNA binding protein of the uracil DNA glycosylase superfamily. Nucleic Acids Research, 1-12 (2015).
[0565] 17. Savva, R., McAuley-Hecht, K., Brown, T., and Pearl, L. The structural basis of specific base-excision repair by uracil-DNA glycosylase. Nature 373, 487-493 (1995).
[0566] 18. Slupphaug, G., Mol, C. D., Kavli, B., Arvai, A. S., Krokan, H. E., and Tainer, J. A. A nucleotide-flipping mechanism from the structure of human uracil-DNA glycosylase bound to DNA. Nature 384, 87-92 (1996).
[0567] 19. Weill, J. C. and Reynaud C. A. DNA polymerases in adaptive immunity. Nature Rev. Immunology 8, 302-312 (2008).
[0568] 20. Yasui, A. Alternative excision repair pathways. Cold Spring Harbor Perspectives in Biology, 1-8 (2013).

### Example 6:—Cas9 Variant Sequences

[0569] The disclosure provides Cas9 variants, for example Cas9 proteins from one or more organisms, which may comprise one or more mutations (e.g., to generate dCas9 or Cas9 nickase). In some embodiments, one or more of the amino acid residues, identified below by an asterek, of a Cas9 protein may be mutated. In some embodiments, the D10 and/or H840 residues of the amino acid sequence provided in SEQ ID NO: 6, or a corresponding mutation in any Cas9 provided herein, such as any one of the amino acid sequences provided in SEQ ID NOs: 4-26, are mutated. In some embodiments, the D10 residue of the amino acid sequence provided in SEQ ID NO: 6, or a corresponding mutation in any Cas9 provided herein, such as any of the amino acid sequences provided in SEQ ID NOs: 4-26, is mutated to any amino acid residue, except for D. In some embodiments, the D10 residue of the amino acid sequence provided in SEQ ID NO: 6, or a corresponding mutation in any Cas9, such as any one of the amino acid sequences provided in SEQ ID NOs: 4-26, is mutated to an A. In some embodiments, the H840 residue of the amino acid sequence provided in SEQ ID NO: 6, or a corresponding residue in any Cas9, such as any of the amino acid sequences provided in SEQ ID NOs: 4-26, is an H. In some embodiments, the H840 residue of the amino acid sequence provided in SEQ ID NO: 6, or a corresponding mutation in any Cas9, such as any of the amino acid sequences provided in SEQ ID NOs: 4-26, is mutated to any amino acid residue, except for H. In some embodiments, the H840 residue of the amino acid sequence provided in SEQ ID NO: 6, or a corresponding mutation in any Cas9, such as any of the amino acid sequences provided in SEQ ID NOs: 4-26, is mutated to an A. In some embodiments, the D10 residue of the amino acid sequence provided in SEQ ID NO: 6, or a corresponding residue in any Cas9, such as any of the amino acid sequences provided in SEQ ID NOs: 4-26, is a D.

[0570] Cas9 sequences from various species were aligned to determine whether corresponding homologous amino acid residues of D10 and H840 of SEQ ID NO: 6 can be identified in other Cas9 proteins, allowing the generation of Cas9 variants with corresponding mutations of the homologous amino acid residues. The alignment was carried out using the NCBI Constraint-based Multiple Alignment Tool (COBALT (accessible at st-va.ncbi.nlm.nih.gov/tools/cobalt), with the following parameters. Alignment parameters: Gap penalties −11,−1; End-Gap penalties −5,−1. CDD Parameters: Use RPS BLAST on; Blast E-value 0.003; Find Conserved columns and Recompute on. Query Clustering Parameters: Use query clusters on; Word Size 4; Max cluster distance 0.8; Alphabet Regular.

[0571] An exemplary alignment of four Cas9 sequences is provided below. The Cas9 sequences in the alignment are: Sequence 1 (S1): SEQ ID NO: 23| WP_0109222511 gi 499224711 type II CRISPR RNA-guided endonuclease Cas9 [Streptococcus pyogenes]; Sequence 2 (S2): SEQ ID NO: 24| WP_039695303 I gi 746743737| type II CRISPR RNA-guided endonuclease Cas9 [Streptococcus gallolyticus]; Sequence 3 (S3): SEQ ID NO: 25| WP_045635197 I gi 782887988| type II CRISPR RNA-guided endonuclease Cas9 [Streptococcus mitis]; Sequence 4 (S4): SEQ ID NO: 26 | 5AXW_A |gi 9244435461 Staphylococcus Aureus Cas9. The HNH domain (bold and underlined) and the RuvC domain (boxed) are identified for each of the four sequences. Amino acid residues 10 and 840 in S1 and the homologous amino acids in the aligned sequences are identified with an asterisk following the respective amino acid residue.

S1 1 --MDKK-YSIGLD*IGTNSVGWAVITDEYKVPSKKFKVLGNTDRHSIKKNLI--GALLFDSG--ETAEATRLKRTARRRYT 73
S2 1 --MTKKNYSIGLD*IGTNSVGWAVITDDYKVPAKKMKVLGNTDKKYIKKNLL--GALLFDSG--ETAEATRLKRTARRRYT 74
S3 1 --M-KKGYSIGLD*IGTNSVGFAVITDDYKVPSKKMKVLGNTDKRFIKKNLI--GALLFDEG--TTAEARRLKRTARRRYT 73
S4 1 GSHMKRNYILGLD*IGITSVGYGII--DYET-----------------RDVIDAGVRLFKEANVENNEGRRSKRGARRLKR 61
S1 74 RRKNRICYLQEIFSNEMAKVDDSFFHRLEESFLVEEDKKHERHPIFGNIVDEVAYHEKYPTIYHLRKKLVDSTDKADLRL 153
S2 75 RRKNRLRYLQEIFANEIAKVDESFFQRLDESFLTDDDKTFDSHPIFGNKAEEDAYHQKFPTIYHLRKHLADSSEKADLRL 154
S3 74 RRKNRLRYLQEIFSEEMSKVDSSFFHRLDDSFLIPEDKRESKYPIFATLTEEKEYHKQFPTIYHLRKQLADSKEKTDLRL 153
S4 62 RRRHRIQRVKKLL--------------FDYNLLTD--------------------HSELSGINPYEARVKGLSQKLSEEE 107
S1 154 IYLALAHMIKFRGHFLIEGDLNPDNSDVDKLFIQLVQTYNQLFEENPINASGVDAKAILSARLSKSRRLENLIAQLPGEK 233
S2 155 VYLALAHMIKFRGHFLIEGELNAENTDVQKIFADFVGVYNRTFDDSHLSEITVDVASILTEKISKSRRLENLIKYYPTEK 234
S3 154 IYLALAHMIKYRGHFLYEEAFDIKNNDIQKIFNEFISIYDNTFEGSSLSGQNAQVEAIFTDKISKSAKRERVLKLFPDEK 233
S4 108 FSAALLHLAKRRG----------------------VHNVNEVEEDT---------------------------------- 131
S1 234 KNGLFGNLIALSLGLTPNFKSNFDLAEDAKLQLSKDTYDDDLDNLLAQIGDQYADLFLAAKNLSDAILLSDILRVNTEIT 313
S2 235 KNTLFGNLIALALGLQPNFKTNFKLSEDAKLQFSKDTYEEDLEELLGKIGDDYADLFTSAKNLYDAILLSGILTVDDNST 314
S3 234 STGLFSEFLKLIVGNQADFKKHFDLEDKAPLQFSKDTYDEDLENLLGQIGDDFTDLFVSAKKLYDAILLSGILTVTDPST 313
S4 132 -----GNELS------------------TKEQISRN-------------------------------------------- 144
S1 314 KAPLSASMIKRYDEHHQDLTLLKALVRQQLPEKYKEIFFDQSKNGYAGYIDGGASQEEFYKFIKPILEKM--DGTEELLV 391
S2 315 KAPLSASMIKRYVEHHEDLEKLKEFIKANKSELYHDIFKDKNKNGYAGYIENGVKQDEFYKYLKNILSKIKIDGSDYFLD 394
S3 314 KAPLSASMIERYENHQNDLAALKQFIKNNLPEKYDEVFSDQSKDGYAGYIDGKTTQETFYKYIKNLLSKF--EGTDYFLD 391
S4 145 ----SKALEEKYVAELQ-------------------------------------------------LERLKKDG------ 165
S1 392 KLNREDLLRKQRTFDNGSIPHQIHLGELHAILRRQEDFYPFLKDNREKIEKILTFRIPYYVGPLARGNSRFAWMTRKSEE 471
S2 395 KIEREDFLRKQRTFDNGSIPHQIHLQEMHAILRRQGDYYPFLKEKQDRIEKILTFRIPYYVGPLVRKDSRFAWAEYRSDE 474
S3 392 KIEREDFLRKQRTFDNGSIPHQIHLQEMNAILRRQGEYYPFLKDNKEKIEKILTFRIPYYVGPLARGNRDFAWLTRNSDE 471
S4 166 --EVRGSINRFKTSD-------YVKEAKQLLKVQKAYHQLDQSFIDTYIDLLETRRTYYEGP--GEGSPFGW-------K 227
S1 472 TITPWNFEEVVDKGASAQSFIERMTNFDKNLPNEKVLPKHSLLYEYFTVYNELTKVKYVTEGMRKPAFLSGEQKKAIVDL 551
S2 475 KITPWNFDKVIDKEKSAEKFITRMTLNDLYLPEEKVLPKHSHVYETYAVYNELTKIKYVNEQGKE-SFFDSNMKQEIFDH 553
S3 472 AIRPWNFEEIVDKASSAEDFINKMTNYDLYLPEEKVLPKHSLLYETFAVYNELTKVKFIAEGLRDYQFLDSGQKKQIVNQ 551
S4 228 DIKEW---------------YEMLMGHCTYFPEELRSVKYAYNADLYNALNDLNNLVITRDENEK---LEYYEKFQIIEN 289
S1 552 LFKTNRKVTVKQLKEDYFKKIECFDSVEISGVEDR---FNASLGTYHDLLKIIKDKDFLDNEENEDILEDIVLTLTLFED 628
S2 554 VFKENRKVTKEKLLNYLNKEFPEYRIKDLIGLDKENKSFNASLGTYHDLKKIL-DKAFLDDKVNEEVIEDIIKTLTLFED 632
S3 552 LFKENRKVTEKDIIHYLHN-VDGYDGIELKGIEKQ---FNASLSTYHDLLKIIKDKEFMDDAKNEAILENIVHTLTIFED 627
S4 290 VFKQKKKPTLKQIAKEILVNEEDIKGYRVTSTGKPEF---TNLKVYHDIKDITARKEII---ENAELLDQIAKILTIYQS 363
S1 629 REMIEERLKTYAHLFDDKVMKQLKR-RRYTGWGRLSRKLINGIRDKQSGKTILDFLKSDGFANRNFMQLIHDDSLTFKED 707
S2 633 KDMIHERLQKYSDIFTANQLKKLER-RHYTGWGRLSYKLINGIRNKENNKTILDYLIDDGSANRNFMQLINDDTLPFKQI 711
S3 628 REMIKQRLAQYDSLFDEKVIKALTR-RHYTGWGKLSAKLINGICDKQTGNTILDYLIDDGKINRNFMQLINDDGLSFKEI 706
S4 364 SEDIQEELTNLNSELTQEEIEQISNLKGYTGTHNLSLKAINLILDE------LWHTNDNQIAIFNRLKLVP--------- 428

[chemical structure]

[chemical structure]

[chemical structure]

[chemical structure]

S1 782 KRIEEGIKELGSQIL-------KEHPVENTQLQNEKLYLYYLQNGRDMYVDQELDINRLSD----YDVDH*IVPQSFLKDD 850
S2 785 KKLQNSLKELGSNILNEEKPSYIEDKVENSHLQNDQLFLYYIQNGKDMYTGDELDIDHLSD----YDVDH*IVPQSFLKDD 860
S3 780 KRIEDSLKILASGL---DSNILKENPTDNNQLQNDRLFLYYLQNGKDMYTGEALDINQLSS----YDIDH*IIPQAFIKDD 861
S4 506 ERIEEIIRTTGK---------------ENAKYLIEKIKLHDMQEGKCLYSLEAIPLEDLLNNPFNYEVDH*IIPRSVSFDN 570

[chemical structure]

[chemical structure]

[chemical structure]

[chemical structure]

[chemical structure]

[chemical structure]

[chemical structure]

[chemical structure]

[chemical structure]

[chemical structure]

[chemical structure]

[chemical structure]

[chemical structure]

[chemical structure]

[chemical structure]

[chemical structure]

S1 1150 EKGKSKKLKSVKELLGITIMERSSFEKNPI-DFLEAKG-----YKEVKKDLIIKLPKYSLFELENGRKRMLASAGELQKG 1223
S2 1159 EKGKAKKLKTVKELVGISIMERSFFEENPV-EFLENKG-----YHNIREDKLIKLPKYSLFEFEGGRRRLLASASELQKG 1232
S3 1157 EKGKAKKLKTVKTLVGITIMEKAAFEENPI-TFLENKG-----YHNVRKENILCLPKYSLFELENGRRRLLASAKELQKG 1230
S4 836 DPQTYQKLK--------LIMEQYGDEKNPLYKYYEETGNYLTKYSKKDNGPVIKKIKYYGNKLNAHLDITDDYPNSRNKV 907
S1 1224 NELALPSKYVNFLYLASHYEKLKGSPEDNEQKQLFVEQHKHYLDEIIEQISEFSKRVILADANLDKVLSAYNKH------ 1297
S2 1233 NEMVLPGYLVELLYHAHRADNF-----NSTEYLNYVSEHKKEFEKVLSCVEDFANLYVDVEKNLSKIRAVADSM------ 1301
S3 1231 NEIVLPVYLTTLLYHSKNVHKL-----DEPGHLEYIQKHRNEFKDLLNLVSEFSQKYVLADANLEKIKSLYADN------ 1299
S4 908 VKLSLKPYRFD-VYLDNGVYKFV-----TVKNLDVIK--KENYYEVNSKAYEEAKKLKKISNQAEFIASFYNNDLIKING 979
S1 1298 RDKPIREQAENIIHLFTLTNLGAPAAFKYFDTTIDRKRYTSTKEVLDATLIHQSIT--------GLYETRI----DLSQL 1365
S2 1302 DNFSIEEISNSFINLLTLTALGAPADFNFLGEKIPRKRYTSTKECLNATLIHQSIT--------GLYETRI----DLSKL 1369
S3 1300 EQADIEILANSFINLLTFTALGAPAAFKFFGKDIDRKRYTTVSEILNATLIHQSIT--------GLYETWI----DLSKL 1367
S4 980 ELYRVIGVNNDLLNRIEVNMIDITYR-EYLENMNDKRPPRIIKTIASKT---QSIKKYSTDILGNLYEVKSKKHPQIIKK 1055
S1 1366 GGD 1368 (SEQ ID NO: 23)
S2 1370 GEE 1372 (SEQ ID NO: 24)
S3 1379 GED 1370 (SEQ ID NO: 25)
S4 1056 G-- 1056 (SEQ ID NO: 26)

[0572] The alignment demonstrates that amino acid sequences and amino acid residues that are homologous to a reference Cas9 amino acid sequence or amino acid residue can be identified across Cas9 sequence variants, including, but not limited to, Cas9 sequences from different species, by identifying the amino acid sequence or residue that aligns with the reference sequence or the reference residue using alignment programs and algorithms known in the art. This disclosure provides Cas9 variants in which one or more of the amino acid residues identified by an asterisk in SEQ ID NOs: 23-26 (e.g., S1, S2, S3, and S4, respectively) are mutated as described herein. The residues D10 and H840 in Cas9 of SEQ ID NO: 6 that correspond to the residues identified in SEQ ID NOs: 23-26 by an asterisk are referred to herein as “homologous” or “corresponding” residues. Such homologous residues can be identified by sequence alignment, e.g., as described above, and by identifying the sequence or residue that aligns with the reference sequence or residue. Similarly, mutations in Cas9 sequences that correspond to mutations identified in SEQ ID NO: 6 herein, e.g., mutations of residues 10, and 840 in SEQ ID NO: 6, are referred to herein as “homologous” or “corresponding” mutations. For example, the mutations corresponding to the D10A mutation in SEQ ID NO: 6 or S1 (SEQ ID NO: 23) for the four aligned sequences above are D11A for S2, D10A for S3, and D13A for S4; the corresponding mutations for H840A in SEQ ID NO: 6 or S1 (SEQ ID NO: 23) are H850A for S2, H842A for S3, and H560A for S4.

[0573] Further, several Cas9 sequences from different species have been aligned using the same algorithm and alignment parameters outlined above. Several Cas9 sequences (SEQ ID NOs: 11-260) from different species were aligned using the same algorithm and alignment parameters outlined above, as is shown in e.g., International Patent Publication No. WO 2017/070632, published Apr. 27, 2017, entitled “Nucleobase editors and uses thereof”; which is incorporated by reference herein. Amino acid residues homologous to residues of other Cas9 proteins may be identified using this method, which may be used to incorporate corresponding mutations into other Cas9 proteins. Amino acid residues homologous to residues 10, and 840 of SEQ ID NO: 6 were identified in the same manner as outlined above. The alignments are provided herein and are incorporated by reference. The HNH domain (bold and underlined) and the RuvC domain (boxed) are identified for each of the four sequences (SEQ ID NOs: 23-26). Single residues corresponding to amino acid residues 10, and 840 in SEQ ID NO: 6 are boxed in SEQ ID NO: 23 in the alignments, allowing for the identification of the corresponding amino acid residues in the aligned sequences.

### Example 7: Development of a Set of C•G-to-G•C Transversion Base Editors from CRISPRi Screens, Target-Library Analysis, and Machine Learning

[0574] Single-nucleotide variants (SNVs) represent approximately half of currently known human pathogenic gene variants¹. Base editors, fusions of programmable DNA-binding proteins with base-modifying enzymes, enable conversion of individual target nucleotides in the genome²⁻¹⁰. The two major classes of base editors are cytosine base editors (CBEs), which convert C•G to T•A, and adenine base editors (ABEs), which convert A•T to G•C^{2,3,8}. CBEs and ABEs can install transition mutations with high efficiency and product purity (the fraction of all edited alleles that contain only the desired edit), but in general, cannot efficiently install transversion mutations including C•G to G•C^{2,5,11,12}.

[0575] It was previously demonstrated that CBE editing byproducts, including C•G-to-G•C or C•G-to-A•T transversion outcomes, are inhibited by knockout of cellular uracil DNA N-glycosylase (UNG) or by fusion of uracil glycosylase inhibitor (UGI)^{2,7,8,11,12}, suggesting that transversion byproducts result from an abasic intermediate that is generated by UNG-catalyzed excision of deaminated target cytosines (FIG. 56A) (see International Publication No. WO 2018/165629). Consistent with this model, first-generation C•G-to-G•C base editors (CGBEs) were CBE derivatives that lack UGI domains¹¹. These CGBEs, including editors with fusions to UNG and other DNA-repair proteins¹³⁻¹⁶, can provide efficient C•G-to-G•C editing but only at a minority of tested target sites with few criteria to identify sites amenable to CGBE editing¹³⁻¹⁵.

[0576] Previously, libraries containing thousands of genomically integrated target sites and corresponding guide RNAs in mammalian cells were used to comprehensively characterize CBE and ABE base editing profiles. These data were used to train machine learning models (collectively named “BE-Hive”) that learned the sequence determinants driving CBE and ABE base editing outcomes^{12,17}. The BE-HIVE AI model provided in PCT/US2021/016924, filed Feb. 5, 2021, which is incorporated herein by reference, offered an opportunity to test how the predictions of the model hold up empirically. The BE-DICT deep learning algorithm provided in Marquart, K. F. et al. bioRxiv (2020), which is also incorporated herein by reference, offered a similar opportunity. It was envisioned that broad characterization of the sequence determinants of CGBE editing outcomes could enable accurate prediction of editing efficiencies and product purities, and thus facilitate the broader use of CGBEs.

[0577] A focused CRISPR interference (CRISPRi) screen was performed to identify DNA repair genes that impact cytosine base editing efficiency and purity. Guided by these data, various fusions proteins were constructed containing deaminases and Cas proteins fused to DNA repair components to engineer novel CGBEs with promising C•G-to-G•C editing activities. Ten such CGBEs were characterized with diverse editing profiles using a “comprehensive context library” of 10,638 genomically integrated, highly variable target sites in mouse embryonic stem cells (mESCs)¹². The resulting data was used to train machine learning models that successfully predict CGBE editing efficiency, purity, and bystander editing patterns with high accuracy (CGBE-Hive), enabling reliable identification of CGBE variants and target sites that together support high-purity C•G-to-G•C editing. Moreover, it was shown that editing activity is predicted with substantially higher accuracy by deep learning models compared to simpler models, indicating that CGBE-Hive has learned complex sequence features that play important roles in determining C-to-G editing activity. Notably, 247 cytosines predicted by CGBE-Hive to be edited by a CGBE with >80% C•G-to-G•C editing purity were indeed edited in mammalian cell experiments with an average of 83% purity.

[0578] The panel of CGBEs presented herein offer diverse editing profiles that collectively expand the sequence landscape amenable to high-quality C•G-to-G•C editing by up to 4.1-fold over the number predicted to be amenable to editing by any single CGBE. Finally, it was demonstrated that CGBE-mediated correction of 546 disease-associated single-nucleotide variants (SNVs) with >90% precision among the resulting edited amino acid sequences. These findings advance understanding of transversion base editing outcomes and provide new CGBEs that improve the scope and utility of base editing.

### Results

### Exploring the Activity of DNA Glycosylases in C•G-to-G•C Transversion Outcomes

[0579] It was previously suggested that excision of uracil from genomic DNA to generate an abasic lesion followed by error-prone polymerase activity on the strand opposite the abasic site results in C•G-to-G•C and C•G-to-A•T transversion outcomes (FIG. 56A)^{2,11,16} Motivated by this model, C•G-to-G•C base editors that enhanced uracil excision at CBE-edited nucleotides were developed. CBE architecture lacking UGI (BE4B) (BPNLS-APOBEC1-Cas9 D10A-BPNLS; abbreviated AC), was used as a starting point, similar to other reported CGBEs¹³⁻¹⁵.

[0580] A variety of known uracil excising and binding enzymes were fused to the C-terminus of the BE4B (AC) scaffold and assessed the frequency of C•G-to-G•C edits across five genomic loci in HEK293T cells (FIG. 56B). Several glycosylases (i.e., SMUG1, MBD4, and TDG2) did not alter editing outcomes, and fusion to UNG led to a reduction of C•G-to-G•C editing yield and purity at three out of five targeted sites, consistent with a recent report¹³. Nevertheless, it was found that fusion of a UNG orthologue from M. smegmatis (UdgX) moderately improved C•G-to-G•C product purity by 1.2-fold on average¹⁸⁻²⁰, with the largest improvement at the RNF2 locus (56±0.8% with BE4B to 72±2.1% with AC-UdgX; p=0.0002, Student's two-sided t-test) and significant changes observed at HEK site 2 C6, HEK site 3 C5, and EMX1 C6 (p<0.01, Student's two-sided t-test). However, only modest changes were observed to editing yield (1.1-fold relative to BE4B at the most efficiently edited C across the five tested genomic loci). These observations suggested that fusion partners may enhance C•G-to-G•C transversion base editing outcomes.

[0581] Next, the impact of orientation of the glycosylase fusion on editing outcomes was studied. BE4B (AC) fusion variants were constructed with either UdgX (abbreviated X) or GFP in three orientations: at either the N- or C-terminus (e.g., XAC or ACX) or between the deaminase and Cas9 (e.g., AXC). It was observed that C•G-to-G•C editing was similar or slightly improved for UdgX fusions compared to N- and C-terminal GFP fusions (FIG. 56C). However, the editing efficiency and purity of AXC was modestly higher than that of the best GFP fusion at a majority of sites (four out of five sites for efficiency; three out of five sites for purity). The AXC architecture was advanced since it offered similar or better performance than the XAC and ACX variants at these test loci.

### CRISPRi Screen for Determinants of Base Editing Outcomes

[0582] Next, the impact of other DNA repair or translesion synthesis factors on C•G-to-G•C editing outcomes of AXC was investigated. It was previously demonstrated that the purity of canonical C•G-to-T•A edits by CBEs improved dramatically in cells lacking nuclear uracil DNA N-glycosylase (UNG) or when one or more uracil glycosylase inhibitor proteins (UGI) were appended CBEs^{2,11,12,16}, suggesting that excision of uracil from genomic DNA to form an abasic site was an important early step in achieving transversion base editing outcomes. As such, the molecular mechanisms that transform abasic sites into transversion edits in mammalian cells were studied further.

[0583] UdgX fusion proteins were tested to determine whether they require cellular UNG to install C•G-to-G•C edits. C•G-to-G•C editing with AXC was minimal in UNG2-HAP1 cells compared to UNG+ cells, confirming that C•G-to-G•C transversion outcomes indeed are promoted by cellular UNG-mediated formation of an abasic site intermediate, even when using the AXC construct (FIG. 2A).

[0584] AP endonuclease-1 (APE1 or APEX1) initiates short patch base excision repair (sp-BER) following abasic site formation by nicking the abasic site-containing strand. Polymerases such as PolB then resynthesize the damaged strand using the intact stand as a template^{38,39}. Loss of APE1 was tested to determine whether it could bias the repair of CBE-induced abasic sites towards C•G-to-G•C outcomes by measuring cytosine base editing outcomes with non-nicking BE1 (BPNLS-APOBEC1-dead Cas9-BPNLS), nicking BE4B (BPNLS-APOBEC1-Cas9 D10A-BPNLS), and the AXC construct in APE1-deficient HAP1 cells. No meaningful differences in editing by BE1 in APE1-deficient HAP1 cells were observed compared to APE1+HAP1 cells. C•G-to-G•C editing yields with either BE4B or AXC were modestly increased in APE1-cells compared to APE1+ cells and C•G-to-G•C editing purity was not significantly different (FIG. 62B). These data suggest that APE1 does not play a major non-redundant role in resolving CBE edits towards transversion outcomes.

[0585] Next, the contributions of mismatch repair proteins on C•G-to-G•C editing outcomes were evaluated⁴⁰. Using the same panel of BE1, BE4B, and AXC editors, only modest changes in C•G-to-G•C editing yield and no significant changes in editing purity in MLH1-HAP1 cells compared with MLH1+ controls were observed (FIG. 62C).

[0586] Surprisingly, loss of REV1—a cellular polymerase known for its deoxycytidyl transferase activity^{41,42}—modestly increased, rather than decreased, C•G-to-G•C editing outcomes. These data suggest that alternative polymerases could install C opposite abasic lesions that result from cytosine base editing. (FIG. 62D). To explore the possibility that other polymerases may play key roles in installing either the C opposite the abasic site or the G that replaces the original C, a panel of ten N- and C-terminal fusions of DNA polymerase catalytic domains to the AXC construct were constructed and assessed editing outcomes at three genomic loci in HEK293T cells. No consistently improved editing outcomes were observed with any polymerase-fused AXC variant^{39,43} (FIGS. 63A-63D).

[0587] No significant changes in editing purity of AXC was observed in individual UNG, APE1/APEX1, MLH1, REV1 knockout cell lines, and direct AXC fusions to mammalian polymerase domains did not consistently improve editing outcomes (FIGS. 62A-62D and FIGS. 63A-63B). Thus, a much broader search for modulators of cytosine transversion editing was performed by performing two high-throughput genetic screens.

[0588] Using a recently developed screening platform capable of reading out DNA repair outcomes by DNA sequencing (FIGS. 57A-57B, FIG. 64A) (see Hussmann et al., Mapping the Genetic Landscape of DNA Double-strand Break Repair. Cell (2021) 184(22), 5653-5669.e25, which is herein incorporated by reference), the impact of knockdown of each of 476 genes, a set enriched for regulators of DNA repair, on the activity of BE1 (deaminase-dCas9) and BE4B (AC) editors was investigated. Briefly, an sgRNA library (1,513 gene-targeting sgRNAs and 60 non-targeting controls) was transduced into HeLa cells stably expressing the CRISPRi effector dSpCas9-KRAB21. After allowing 5 days for gene knockdown, the cells were transfected with plasmids encoding SaCas9-based CBEs (either SaCas9-BE1 or SaCas9-BE4B) and an SaCas9 sgRNA that targets a sequence adjacent to the genomically integrated SpCas9 sgRNA sequences. Notably, SaCas9-based CBEs were used to avoid guide RNA exchange between the base editors and CRISPRi machinery. A key aspect of this approach was that the proximity of the target site and CRISPRi sgRNA enabled these features to be read out together by paired-end DNA sequencing, thus linking editing outcomes to CRISPRi perturbation identities (FIG. 57A). To prepare samples for sequencing, genomic DNA from treated cells was isolated, unique molecular identifiers (UMIs) were affixed to DNA fragments containing both the sgRNA expression cassettes and edited target sites, and the linked sgRNA, target sites, and UMI sequences were sequenced. Comparing frequencies of editing outcomes from each CRISPRi sgRNA with those from non-targeting sgRNAs (FIG. 57B, FIG. 64A) then identified genes that promote or suppress various editing outcomes.

[0589] Consistent baseline activity of BE1 and BE4B in the screens enabled quantitation of editing differences driven by CRISPRi sgRNAs (FIGS. 57A-57D, FIGS. 64A-64C, FIGS. 65A-65E). To evaluate differences in point mutations, the effects of all CRISPRi sgRNAs on the frequencies of two major categories were calculated: outcomes containing any C•G-to-T•A point mutation and outcomes containing any C•G-to-G•C point mutation (FIG. 57C). For both classes, the effects of individual CRISPRi sgRNAs were consistent between replicates (FIG. 57C, upper left and lower right panels). Comparison between classes though revealed that some CRISPRi sgRNAs showed different effects on C•G-to-T•A versus C•G-to-G•C outcomes (FIG. 57C, upper right panel), indicating that specific genes influence partitioning between these outcomes. In the BE4B screen, the clearest differential effects resulted from sgRNAs targeting UNG (FIGS. 57B-57C). Consistent with the effects of UGI fusions and UNG loss^{2,11}, UNG knockdown increased frequencies of C•G-to-T•A editing while decreasing frequencies of C•G-to-G•C editing. Notably, the effects of UNG repression on BE1 editing were not as significant or straightforward (FIG. 58A, FIG. 58C), perhaps reflecting differences in how nicked versus unnicked target substrates are processed (FIG. 57B, FIG. 58A).

[0590] One advantage to screening with sequencing-based readouts was that changes to a diverse range of editing products could be detected. For example, it was also observed that CRISPRi-mediated depletion of double-strand breaks (DSB) repair genes affect the frequency of rare indels caused by base editing, though these pathway-phenotype relationships were not always straightforward (FIG. 65A). Indeed, while knockdown of HDR factors BRCA1, BRCA2, and PALB2 increased AC-generated deletions, depletion of the HDR gene BLM decreased them. Interestingly, depletion of BRCA2 was also among the strongest reducers of C•G-to-T•A editing outcomes (FIG. 65B). Genes that affect the base editing window were also identified (FIG. 65C, FIGS. 66A-66B).

[0591] Using screening data, genes that control the base editing activity window were identified. For each CRISPRi sgRNA, the fraction of all edited reads that included a point mutation were calculated at each position in or near the target sequence. Then, genes that significantly changed the relative editing frequency at any nucleotide position compared to non-targeting CRISPRi sgRNA controls were identified (FIG. 65C). Intriguingly, two helicase genes, RECQL and HLTF, emerged from this analysis. Repression of RECQL selectively reduced editing at the PAM-distal C in position +1 of the target sequence, where the SaCas9 NNGRRT (SEQ ID NO: 223) PAM is positions 22-27 (FIGS. 66A-66B), while repression of HLTF specifically increased editing at the G in position +3 (FIGS. 66A-66B). Together, these observations suggest that cellular helicases can influence the location of base editing activity within a target sequence, potentially by increasing the accessibility of cytosines at position +1 in the case of RECQL, or by reducing accessibility of the C opposite the position +3 G in the case of HLTF.

[0592] To identify genes that specifically promoted C•G-to-G•C editing, the relative fraction of outcomes containing any C•G-to-G•C edit among outcomes containing any point mutation for each CRISPRi sgRNA were calculated (FIG. 47D, FIG. 65D). The gene whose knockdown most significantly reduced the C•G-to-G•C editing fraction compared to non-targeting sgRNAs was RFWD3, an E3 ligase with multiple roles in DNA repair recently identified as required for successful translesion synthesis across a variety of genomic lesions²². Other hits included UNG; multiple subunits of the replicative polymerase POLD and replicative clamp loader RFC; EXO1; translesion polymerases REV1 and REV3L; and RAD18, an E3 ubiquitin ligase involved in translesion synthesis.

[0593] The different phenotypes for REV1 knockdown versus the individual knockout cell line may arise from compensatory mechanisms that could alter DNA repair outcomes in cells lacking REV1. Genes whose knockdown reduced frequencies of both C•G-to-T•A and C•G-to-G•C base editing for both BE1 and BE4B were also identified (FIG. 65E), including ASCC3, which may act by affecting accessibility of the target locus, a known determinant of base editing efficiency^{2,3,8}. Together, these screen results suggest important roles for DNA replication processes, especially translesion synthesis, in modulating C•G-to-G•C base editing outcomes.

### CBE Fusion Proteins can Alter C•G-to-G•C Transversion Outcomes

[0594] To further advance the development of CGBEs, new CGBE candidates were generated by fusing AXC, the prototype CGBE described above, to proteins nominated by the CRISPRi screens. These included those encoded by genes that reduced C•G-to-G•C editing following knockdown, including DDX1, EXO1, POLD1, POLD2, POLD3, RAD18, RBMX, REV1, RFWD3, and TIMELESS, and several additional genes involved in DNA polymerization, some of which also affected editing outcomes in the CRISPRi screen (PCNA, POLH, POLK, UBE2I, and UBE2T).

[0595] Each of these proteins were fused to the N- or C-terminus of AXC to assess their effect on C•G-to-G•C editing efficiency or purity and assessed their editing performance at five genomic loci in HEK293T cells. Three proteins increased C•G-to-G•C editing purity when fused to the N-terminus of AXC (FIG. 67A): DNA polymerase D2 (POLD2), exonuclease 1 (EXO1), and RNA binding motif protein X-linked (RBMX). Editing improvements for fused constructs varied by site. The most pronounced effects were observed at the RNF2 locus, where editing purity significantly improved from 54±1.4% with AXC to 73±0.4% with RBMX-AXC, 74±1.4% for EXO1-AXC, and 77±0.8% for POLD2-AXC (p<0.001, Student's two-sided t-test). Marginal improvements in purity were also observed at HEK site 2, HEK site 3, and HEK site 4 loci. A significant increase in editing yield was also observed at RNF2, from 43±2.4% with AXC to 50±5.2% with RBMX-AXC, 53±3.6% with EXO1-AXC, and 55±5.5% for POLD2-AXC (p<0.05, Student's two-sided t-test). C-terminal fusions typically did not perform as well as N-terminal fusions.

[0596] Encouraged by these improvements, additional candidate CGBEs were developed containing RBMX, EX01, POLD2, and UdgX as fusions to AXC. Single and dual pairwise fusion architectures were compared for these components, testing N- and C-terminal dual fusions as well as tandem N terminal fusions (N-, N-) using 32-residue linkers identified in a linker-testing experiment for these constructs (FIG. 68). From a total of 28 single- and dual-fusion proteins tested, the four dual fusion architectures POLD2-deaminase-UdgX-nCas9-RBMX, POLD2-deaminase-UdgX-nCas9-UdgX, UdgX-deaminase-UdgX-nCas9-UdgX, and UdgX-deaminase-UdgX-nCas9-RBMX further increased C•G-to-G•C editor yield and purity at some sites (on average, by +10% and +13%, respectively) compared to single fusion architectures across nine cytosines in five genomic loci (FIG. 61B).

[0597] Collectively, these results indicate that CGBEs, including fusions to proteins identified in the CRISPRi screen, can affect C•G-to-G•C editing outcomes in a site-dependent manner. Some base editing applications may prioritize protein size over other base editing characteristics. Therefore, the use of trans-splicing split-inteins was explored as a means to reduce the size of large CGBEs into two smaller protein components²³, and observed no changes in editing outcomes of split-CGBEs compared to their full-length counterparts (FIG. 69). When necessary, these split CGBE variants may support favorable cytosine transversion outcomes without requiring the expression of full-length proteins.

### Base Editor Deaminase and Cas9 Domains Bias Repair Outcomes

[0598] Next, different deaminase domains were studied to determine how they affect C•G-to-G•C editing in the AXC architecture. Since the base editing window may influence cytosine transversion outcomes^{2,11,12} a panel of catalytically impaired deaminases that support different CBE editing windows²⁴ were examined, and an increase in C•G-to-G•C editing purity was observed at three of five tested loci (FIG. 58A). The APOBEC1 R126E R132E (EE)²⁴ deaminase showed the greatest improvement, averaging 1.2-fold higher product purity at HEK site 2, HEK site 3, and RNF2. Editing yield with these deaminase alternatives varied by locus. Similar or reduced editing yield compared to AXC was observed at four out of five loci—likely due to the lower catalytic activity of these deaminases, though reduced yield did not correlate with altered C•G-to-G•C purity. Editing yield by EE-AXC at the RNF2 locus significantly improved (AXC=52±3.2% vs. EE-AXC=66±3.5%, p=0.007, Student's two-sided t-test).

[0599] It was also hypothesized that changes to the Cas9 binding domain of CGBEs could alter editing windows and C•G-to-G•C editing outcomes by altering the competition between Cas9 and repair machinery for access to the target locus. AXC editors that use Cas9 variants were assessed with different binding kinetics, including new variants with combinations of previously reported Cas9 mutations (FIG. 58B)²⁵-2⁸. AX-HF-nCas9 substantially improved C•G-to-G•C editing at the C9 position of the HEK site 3 locus, increasing yield (AXC=34±1.9% vs. AX-HF-nCas9=52±1.7%,) and purity (AXC=49±2.2% vs. AX-HF-nCas9=60±1.2%) (p<0.005 for both, Student's two-sided t-test) (FIG. 58B). AX-Hypa-nCas9 showed similar effects but AX-HF-nCas9 typically performed modestly better. These results suggest Cas protein binding parameters can affect C•G-to-G•C editing yield and purity of CGBEs at some target loci.

[0600] The balance of editing yield and purity among candidate CGBEs and the variability in these two measures across different loci suggests that different target sites will be best edited by different CGBEs. Therefore, a suite of CGBEs with different kinetics and substrate preferences would likely enable efficient and high-purity C•G-to-G•C editing across a broader range of diverse target sequences than could be achieved by any single CGBE variant alone. Combining deaminase, Cas9 domain, and DNA repair fusion proteins into new CGBEs

[0601] The above findings from varying protein fusions, deaminases, and Cas domains were integrated into improved CGBEs. The four most promising dual-fusion AXC editors (POLD2-AXC-RBMX, POLD2-AXC-UdgX, UdgX-AXC-RBMX, and UdgX-AXC-UdgX), four single-fusion AXC editors (POLD2-AXC, RBMX-AXC, EXO1-AXC, and UdgX-AXC), AXCs with deaminase variants of those same editors, and direct deaminase-nCas9 CGBEs without additional fusion proteins were evaluated. The five cytidine deaminases tested in these 10 CGBE architectures included rAPOBEC1, EE, Anc689 (ancestrally-reconstructed rAPOBEC1 node 689²⁹), evolved APOBEC3A (A3A), and eA3A-T31A¹². See International Publication Nos. WO 2019/023680, published Jan. 31, 2019; WO 2019/226953, published Nov. 28, 2019; Kim, Y. B. et al. Nature Biotechnology (2017); and Gehrke et al. Nature Biotechnology (2018), each of which is incorporated by reference herein. In addition, both SpCas9 nickase and HF-Cas9 nickase variants were tested. In total, 95 candidate CGBEs were evaluated at eight genomic loci in HEK293T cells.

[0602] The editor architectures generated and evaluated are listed below. In each of these constructs, the 32 amino acid linker refers to the linker having the amino acid sequence set forth as SEQ ID NO: 108). The terminator may be any transcriptional terminator, such as an SV40 or bovine growth hormone polyadenylation (polyA) sequence: BE4B constructs

[0603] Promoter-BPNLS-[Deaminase]-32 amino acid linker-[Cas9 effector domain]-BPNLS-Terminator

### C-Terminal Glycosylase Constructs

[0604] Promoter-BPNLS-[Deaminase]-32 amino acid linker-[Cas9 effector domain]-SGGS-[Glycosylase variant]-BPNLS-Terminator

### Glycosylase Architecture Constructs

[0605] N-terminal: Promoter-BPNLS-[Glycosylase variant]-SGGS-[Deaminase]-32 amino acid linker-[Cas9 effector domain]-SGGS linker-BPNLS-Terminator

[0606] Internal: Promoter-BPNLS-[Deaminase]-32 amino acid linker-[Glycosylase variant]-32 amino acid linker-[Cas9 effector domain]-BPNLS-Terminator

[0607] C-terminal: Promoter-BPNLS-[Deaminase]-32 amino acid linker-[Cas9 effector domain]-SGGS linker-[Glycosylase variant]-BPNLS-Terminator

### Single Fusion Screen Hit Architecture Constructs

[0608] N-terminal: Promoter-BPNLS-[Screen Hit]-32 amino acid linker-[Deaminase]-32 amino acid linker-UdgX-[Cas9 effector domain]-BPNLS-Terminator

[0609] C-terminal: Promoter-BPNLS-[Deaminase]-32 amino acid linker-UdgX-[Cas9 effector domain] 32 amino acid linker-[Screen Hit]-BPNLS-Terminator

### Dual Fusion Screen Hit Architecture Constructs

[0610] Dual N-, N-terminal: Promoter-BPNLS-[Screen Hit]-32 amino acid linker-[Screen Hit]-32 amino acid linker-[Deaminase]-32 amino acid linker-UdgX-[Cas9 effector domain]-BPNLS-Terminator

[0611] N- and C-terminal: Promoter-BPNLS-[Screen Hit]-32 amino acid linker-[Deaminase]-32 amino acid linker-UdgX-[Cas9 effector domain] 32 amino acid linker-[Screen Hit]-BPNLS-Terminator.

[0612] No single CGBE outperformed all other candidates at all sites (FIG. 59A). To identify a set of the most promising CGBEs, 32 editors that demonstrated improved C•G-to-G•C editing outcomes at some sites were selected for testing at eight additional genomic loci (FIG. 59B). These data were used to identify ten CGBEs with high purity, yield, and maximally distinct activities at different endogenous loci using quadratic programming and hierarchical clustering (Methods): Anc689-nCas9, UdgX-Anc689-UdgX-nCas9-RBMX, eA3A-nCas9, RBMX-eA3A-UdgX-HF-nCas9, RBMX-eA3A-UdgX-nCas9, EE-nCas9, UdgX-EE-UdgX-nCas9-UdgX, APOBEC1-nCas9, UdgX-APOBEC1-UdgX-HF-nCas9, and POLD2-APOBEC1-UdgX-nCas9-UdgX.

[0613] To test how this set of CGBEs performed in human cell lines other than HEK293T cells, the ability of each of these CGBEs to edit five target genomic sites in K562, U2OS, and HeLa was assayed (FIG. 70A-70B). It was observed that while CGBE outcomes vary modestly by cell type, the top-performing CGBE variants for each tested site were generally the same in all three additional cell lines. These results indicate that deaminase, Cas protein, and DNA repair protein variants can improve C•G-to-G•C editing in across different cell types.

### Target Library Characterization of CGBEs

[0614] It was observed that different target loci were best edited by different CGBEs, indicating that diverse CGBE sequence preferences may be strong determinants of C•G-to-G•C editing efficiency and purity. Previously, high-throughput analysis of base editing outcomes at thousands of genomically integrated target sequences was used to better understand CBE and ABE sequence-activity relationships, and these data were used to train machine learning models that facilitate the selection of target sequences amenable to C•G-to-G•C conversion by CBEs¹². It was envisioned that comprehensive characterization of the top ten promising and diverse CGBEs could similarly aid in the selection of targets amenable to efficient and high-purity C•G-to-G•C editing by specific CGBEs.

[0615] Each of the ten CGBEs were characterized using a high-throughput genome-integrated library assay of 10,638 matched sgRNA and target pairs in mESCs, previously referred to as the “comprehensive context library”¹². The target sequences in this library cover all possible sequence contexts surrounding the edited C•G with minimal sequence bias (FIG. 60A, Methods). To detect editing outcomes with high sensitivity, an average coverage of ≥300× per library member was maintained throughout the course of the experiment and an average sequencing depth of ≥4,000× per target. Two biological replicates were collected per CGBE characterization experiment. It was previously validated that the library assay data has strong consistency between biological replicates and is concordant with data from base editing endogenous genomic loci^{12,30}.

[0616] The resulting library data was used to quantify editing windows and product purities for each CGBE (FIG. 60B, Methods). CGBE editing activity was generally centered around protospacer position 6 with editing window widths ranging from 3 nt (EE-nCas9; positions 5-7) to 8 nt (UdgX-APOBEC1-UdgX-HF-nCas9 nickase; positions 4-11). The editing windows of CGBEs with additional components beyond Cas and deaminase domains were shifted by up to 3 nt compared to direct deaminase-Cas fusions, indicating that CGBE protein fusions can affect editing window size and position.

[0617] Engineered CGBE architectures showed significant improvements in C•G-to-G•C product purity compared to simple deaminase-nCas9 fusions. Across the 10,638 target sites in the comprehensive context library, the fusion CGBEs POLD2-APOBEC1-UdgX-nCas9-UdgX, UdgX-EE-UdgX-nCas9-UdgX, and UdgX-Anc689-UdgX-nCas9-RBMX showed 25% higher mean C•G-to-G•C purity than their corresponding deaminase-nCas9 counterparts within each editor's editing window (P<5.1×10-9; Welch's t-test) (FIG. 60C). A large variation in CGBE editing efficiency was observed, with mean efficiency ranging from 1.8% by UdgX-EE-UdgX-nCas9-UdgX to 23.0% by Anc689-nCas9 across the comprehensive context library within the same experimental batch. Notably, the protein fusion CGBEs exhibiting increased C•G-to-G•C purity also reduced editing yield by 1.4-to 1.6-fold on average.

[0618] C•G-to-G•C editing purity exceeded 90% for at least one of the tested CGBEs at 895 cytosines across the comprehensive context library. Some cytosines edited with purities as high as 90-100% by some CGBEs were edited with purity as low as 0-10% by other CGBEs, indicating that these CGBEs indeed offer complementary editing characteristics, and confirming that a panel of diverse CGBEs maximizes the utility of C•G-to-G•C base editing compared to using any single CGBE (FIG. 60D). CGBEs were clustered by C•G-to-G•C editing purity across the comprehensive context library and observed that engineered CGBEs did not cluster by deaminase (FIG. 60E), indicating that protein fusion engineering of CGBE architectures resulted in distinct sequence preferences governing C•G-to-G•C editing.

### Sequence Determinants and Machine Learning Modeling of CGBE Activity

[0619] C•G-to-G•C product purity of CGBEs varies substantially by sequence context (FIG. 5F). A 24.7±26.3% average C•G-to-G•C purity was observed across all tested CGBEs for cytosines positioned near the center of the editing window, with substantial variation across target sequences: the top 5% had >79.6% C•G-to-G•C purity while the bottom 5% had <1.0%. To decipher the sequence determinants that underly CGBE activity, simple motifs were computed for editing efficiency and transversion purity using a logistic regression model that considers each nucleotide independently (see FIG. 5G, Methods)¹². These motifs revealed that TC is strongly favored while GC is disfavored for editing efficiency across the tested CGBEs. Gradient-boosted regression trees were further trained to predict CGBE editing efficiency sequence context, which achieved good accuracy with R=0.57-0.77 at held-out target sites. Consistent with a previous characterization of BE4 variants¹², sequence motifs that associated RCTA with higher C•G-to-G•C purity (R=A or G) across all characterized CGBEs were observed. Cytosines in an ACTA motif were edited with an average C•G-to-G•C purity of 68.7% (N=1,760) across CGBEs, substantially higher than the 24.7% average across all sequence contexts, indicating a major role for sequence context in determining C•G-to-G•C editing outcomes. These simple target sequence motifs predicted 27.0%-53.3% of the variation in C•G-to-G•C purity.

[0620] Next, BE-Hive models were trained for these ten CGBEs (termed CGBE-Hive) and the models' ability to predict C•G-to-G•C editing purity at held-out sequence contexts not seen during training were evaluated. These models explained 58.3%-76.3% of the variance in C•G-to-G•C purity in the held-out dataset, a substantial improvement over logistic regression described above (27.0%-53.3%) (FIG. 60H). This performance improvement highlights that while C•G-to-G•C purity can be predicted using a simple motif such as RCTA that considers each nucleotide independently, higher-order interactions between nucleotides learned by deep neural networks substantially improve C•G-to-G•C editing purity predictions. Collectively, these observations establish that CGBE editing efficiency and purity can be accurately predicted by machine learning models.

[0621] To further investigate sequence determinants of CGBE editing outcomes, target sequence motifs for cytosines with the highest C•G-to-G•C efficiency for each CGBE were calculated (Methods). While most CGBEs shared sequence preferences favoring TC for overall editing efficiency and RCTA for purity, different CGBEs had distinct motifs that correlated with C•G-to-G•C yield. POLD2-APOBEC1-UdgX-nCas9-UdgX favored RCTA for C•G-to-G•C yield, while eA3A-nCas9 simply favored TC (FIG. 60I). Interestingly, RBMX-eA3A-UdgX-nCas9 favored CTC, while UdgX-EE-UdgX-nCas9-UdgX favored TCT, and Anc689-nCas9 favored CTA (FIG. 60I). These observations reveal that different CGBEs show distinct sequence preferences that influence the yield of C•G-to-G•C outcomes.

[0622] Machine learning models trained on up to 10,638 sgRNA-target pairs for these ten CGBEs are provided in an online interactive web app (crisprbehive.design)¹². Users can query sgRNAs and target sequences for data-driven predictions on editing outcomes of all CGBEs characterized herein.

### Model-Guided Correction of Pathogenic Transversion SNVs

[0623] To extend the applicability of these CGBEs, their compatibility with PAM-variant Cas9 proteins were assessed. Editing at eight loci by CGBEs was evaluated using Cas9-NG, an engineered SpCas9 variant with broadened PAM compatibility³¹, and similar editing purities to SpCas9 CGBEs were observed at NGG PAM substrates (FIGS. 71, 72). The best performing NG-CGBEs at each locus retained >50% yield relative to SpCas9 CGBEs at targets with NGG PAMs (FIG. 71).

[0624] Given the broadened targeting scope of NG-CGBEs their performance was characterized on the “transversion-enriched SNV library”12 in mESCs, which contains 3,400 sgRNA-target pairs selected by BE-Hive from 18,523 disease-related G•C-to-C•G and A•T-to-C•G SNVs from the ClinVar and HGMD databases that are targetable by Cas9-NG^{1,32}, predicted to be correctable by cytosine transversion base editing with high purity and yield.

[0625] The following NG-CGBEs were generated based on their performance on the comprehensive context library: Anc689-nCas9-NG, APOBEC1-nCas9-NG, eA3A-nCas9-NG, UdgX-Anc689-UdgX-nCas9-NG-RBMX, and UdgX-APOBEC1-UdgX-HF-nCas9-NG. As Cas9-NG generally demonstrates reduced editing activity compared to wild-type SpCas931, similar to HF-Cas9, UdgX-APOBEC1-UdgX-nCas9-NG was included without the HF modifications as an alternative binding-impaired Cas9-fusion variant.

[0626] All six CGBEs tested on the transversion-enriched SNV library enabled high-purity C•G-to-G•C editing at disease-associated SNVs. At 247 cytosines predicted by CGBE-Hive to have >80% C•G-to-G•C editing purity, CGBEs demonstrated an average of 83% C•G-to-G•C editing purity (FIG. 61A). Each CGBE corrected >200 SNVs to their wild-type coding sequence with >90% precision among edited amino acid sequences (amino acid correction precision; FIG. 61B), with a total of 546 unique SNVs across CGBEs. For example, in the genome-integrated library, eA3A-nCas9-NG corrected the G•C-to-C•G SNV in COL3A1 associated with Ehlers-Danlos syndrome³³ with 71.4% yield and 92.8% purity, and corrected an SNV in BRCA2 associated with familial breast and ovarian cancer 34 with 66.5% yield and 82.5% purity. The fusion CGBE UdgX-APOBEC1-UdgX-nCas9-NG corrected an SNV in NSD1 associated with Sotos syndrome³⁵ with 40.0% yield and 73.4% purity and corrected an SNV in NIPBL associated with Cornelia de Lange syndrome³⁶ with 38.8% yield and 76.9% purity. Collectively, these results reveal efficient and high-purity correction of hundreds of disease-related SNVs by CGBEs.

[0627] Notably, the UdgX-APOBEC1-UdgX-nCas9 CGBE maintained a similar high purity of C•G-to-G•C editing between HF-nCas9 and nCas9-NG variants. UdgX-APOBEC1-UdgX-nCas9-NG, however, offered substantially better yield of genotype and coding sequence corrected G•C-to-C•G SNVs (FIGS. 61A-61B). These results suggest that fusion of CGBEs to Cas9-NG variants may obviate the need to use HF-variant Cas9-proteins to alter their binding kinetics to promote C•G-to-G•C editing outcomes.

[0628] The best-edited targets in the transversion-enriched SNV library varied greatly by CGBE. Some SNVs edited with >90% purity by one CGBEs had purity below 5% for other CGBEs (FIGS. 73A-73B). CGBE-Hive models accurately accounted for this diversity in editing purity in the transversion-enriched SNV library, and accurately predicted the yield of exact genotype correction products and of alleles with corrected amino acid sequences (R=0.89-0.93 and R=0.91-0.94, respectively, FIG. 61C), as well as the DNA and amino acid correction precision (R=0.77-0.85 and R=0.82-0.90, respectively, FIG. 61D), including targets with multiple cytosines in the editing window. Since accurately predicting correction yield and precision requires accurate predictions for CGBE efficiency, C•G-to-G•C purity, and bystander editing patterns, these results establish that CGBE-Hive has learned important aspects of CGBE editing activity and can guide the use of CGBEs for high-purity correction of disease-related transversion SNVs.

[0629] Using CGBE-Hive to pick the best among the characterized CGBEs to correct each SNV should achieve greater C•G-to-G•C correction than applying any single CGBE to a set of targets. Indeed, it was observed that using CGBE-Hive to choose the three CGBE variants predicted to best achieve the desired edit (top-3 performance) increased the number of targets corrected with >90% precision or to >40% efficiency by 4.1- and 5.0-fold, respectively, compared to the number of targets that were expected to be corrected with these precision and efficiency thresholds by picking any single CGBE (FIG. 61E). These improvements of 4.1-and 5.0-fold by using the top three CGBE-Hive choices were nearly identical to the performance from picking the best CGBE out of all six options in hindsight. CGBE-Hive also displayed strong top-1 performance: Using CGBE-Hive to choose just a single CGBE increased the number of targets corrected with >90% precision or to >40% efficiency to 1.7-and 4.0-fold, respectively, compared to picking a single CGBE in expectation.

[0630] For correction precision, CGBE-Hive recovered the best performing CGBE variant in its top choice in 43.3% of targets and in its top three choices in 84.2% of target sequences.

[0631] For correction yield, CGBE-Hive recovered the best-performing CGBE variant in its top choice in 67.5% of targets and in its top three choices in 97.2% of targets. These results collectively demonstrate that this panel of CGBEs have diverse editing activities that CGBE-Hive has learned to predict, to optimize selection of the most promising CGBE variant to use for a desired edit. These improvements were also observed at endogenous loci in HEK293T cells (FIG. 61F).

[0632] CGBE-Hive was used to identify disease-relevant C•G-to-G•C SNVs that could be installed in HEK293T cells using CGBEs characterized in this study. The CTNNB1 c.2138-1 G>C mutation, a cancer-associated allele, was installed by UdgX-APOBEC1-UdgX-HF with higher yield (64±1.0% vs. 51±0.5%) and purity (75±0.8% vs. 67±1.5%) than the best-performing simple deaminase-nCas9 fusion, Anc689-nCas9 (FIG. 61F). Additionally, the DIS3L2 c.2011-1 G>C mutation, associated with Perlmen Syndrome, was installed with higher purity by UdgX-Anc689-UdgX-nCas9-RBMX (46±1.1% vs. 41±1.3%) and similar editing efficiency (32±2.4% vs. 31±2.3%) compared to the best-performing deaminase-nCas9, eA3A-nCas9 (FIG. 51F). NG-CGBEs were also used to install a pathogenic SNV in the KCNQ2 gene predicted to be editable by CGBE-Hive with RBMX-eA3A-UdgX-nCas9, and observed 37.5±3.3% yield and 79.5±1.0% purity (FIG. 6F). These results indicate that CGBEs using both wild-type nCas9 and a Cas9 variant engineered to be compatible with non-native PAM sequences can efficiently install disease-associated alleles in human cells as predicted by CGBE-Hive. These results collectively demonstrate that the CGBEs developed in this study can install disease relevant SNPs with high efficiency and purity.

[0633] Thus, CGBE-Hive enables researchers to reap the benefits of the diversity of CGBEs developed in this study without the need to test all CGBE variants.

Comparisons with Recently Reported CGBEs, Prime Editing, and Off-Target Profiling

[0634] Next, it was determined whether the CGBE variants described in this work extend the scope of C•G-to-G•C base editing beyond those accessible with recently described CGBEs or prime editing (PE). It was found that the CGBEs developed in this study extend the scope of C•G-to-G•C genome editing by enabling higher yields and product purities at a wider array of target sequences compared to the use of previously described CGBEs alone except at loci already edited with high yield and purity by deaminase-nCas9 constructs (FIG. 74).

[0635] The editing activity of CGBEs developed herein were compared to previously described CGBEs2-4 (mini CGBE1, CGBE1, APOBEC1-nCas9-UNG, and APOBEC1-nCas9-XRCC1) across eight genomic loci in HEK293T cells. The CGBEs developed herein outperform previously described CGBEs at six of eight tested loci, with the broader sequence substrate scope of the CGBEs described in this work enabling efficient editing at a broader array of loci. For example, at HEK site 3 C9, UdgX-APOBEC1-UdgX-HF edits with 55.4±1.1% yield and 61.5±0.9% purity while the best previous CGBE (APOBEC1-nCas9-XRCC1) edits with 5.22±0.3% yield and 18.7±1.4% purity (FIG. 74). Additionally, at HBBa C8, RBMX-eA3A-UdgX-C edits with 60.6±3.0% yield and 88.9±1.4% purity while the best performing previous CGBE (CGBE1; eUNG-APOBEC1 R33A-nCas9) edits with 7.2±0.8% yield and 17.6±3.7% purity (FIG. 74). At the two sites, RNF2 and HEK4.1 that were very well edited by deaminase-nCas9 constructs, the CGBEs in this study performed comparably or modestly worse than the best previously reported CGBE. For RNF2, editing purity was comparable for CGBE1 and POLD2-APOBEC1-UdgX-nCas9-UdgX (CGBE1=82.8±0.9% vs. 82.1±1.4%) while yield improved to 74.8±0.4% for CGBE1 vs. 66.1±1.6% (FIG. 74). At HEK4.1, editing yield and purity for CGBE1 were 49.6±4.5% and 75.7±1.2%, respectively, compared with 41.7±1.0% and 55.0±1.2% for UdgX-APOBEC1-UdgX-nCas9 (FIG. 74).

[0636] Furthermore, it was observed that these novel CGBEs complement prime editing technology³⁷. Recently described prime editors (PEs) consist of Cas9 nickase fused to an engineered reverse transcriptase^{15,16}. See also International Publication No. WO 2020/191239, published Sep. 24, 2020, which is incorporated by reference herein. PEs are targeted to a genomic locus by an engineered prime editing guide RNA (pegRNA) that encodes both the desired edit and the target site.

[0637] Since prime editing enables a broad range of genome edits including all 12 possible single-base conversions, as well as small insertions and deletions^{15,16}, it was sought to characterize how CGBEs and prime editors compare. Successful prime editing requires thorough optimization of the primer binding site (PBS) and the reverse transcriptase template in the pegRNA^{15,16}. These parameters were optimized for C•G-v to-G•C edits at four genomic loci (FANCF, HEK site 3, RNF2, and HBBa) (FIG. 14A). Each of these optimized pegRNAs were then tested using PE2, which does not nick the non-edited strand, as well as prime editor 3 (PE3), which nicks the non-edited strand by adding an additional sgRNA. The best-performing CGBE were also evaluated for these loci and editing efficiencies and product purities of CGBEs and PEs were compared at these loci. Two of the four loci (HEK site 3 and FANCF) were edited with higher efficiency and purity using PE compared with CGBEs. The best PE-mediated editing of the FANCF locus was 52.3±0.8% yield with 97.3±0.7% purity with PE3, while the best CGBE-mediated editing (with RBMX-eA3A-UdgX-HF) provided 24.4±0.6% yield and 52.7±2.8% purity. Likewise, the best balance of editing yield and purity by PE at the HEK site 3 locus was 54.3±1.8% yield with 98.2±0.1% purity with PE3, while the best CGBE editing (UdgX-APOBEC1-UdgX-HF) was 49.7±4.3% yield and 62.1±0.7% purity. At the other two loci (RNF2 and HBBa), however, the best-performing CGBEs characterized in this work provide the desired edits with higher efficiency than PE (FIG. 75B). At the RNF2 locus, PE3 installed the target nucleotide with 34.5±2.5% yield and 94.8±1.0% purity while CGBE (POLD2-APOBEC1-UdgX-C-UdgX) installed the same mutation with 62.5±2.3% yield and 81.7±1.7% purity. HBBa editing by PE proceeded with 17.2±1.1% yield and 98.9±0.63% purity with prime editor 2 (PE2) (slightly outperforming PE3) while CGBE (RBMX-eA3A-UdgX-C) edited with 64.0±2.1% yield and 88.3±1.6% purity (FIG. 75B). It was found that PE typically offers higher product purities while editing with CGBEs offers higher editing yields at some loci (FIGS. 75A-75B), consistent with recent reports^{13-15,37}. Notably, prime editing currently requires extensive optimization of pegRNA features to achieve high-efficiency edits, while CGBE-Hive prediction obviates CGBE editor selection. CGBEs complement prime editing for efficient C•G-to-G•C editing, although additional optimization of both technologies may further improve their properties.

[0638] Potential off-target editing outcomes of CGBEs were also characterized. Since the genome-wide off-targets of base editors that use cytosine deaminase enzymes are known to be predominantly sgRNA dependent, Cas9-dependent off-target editing profiles of CGBEs were characterized by examining the activity of CGBEs at previously confirmed off-target loci of corresponding Cas9:sgRNA complexes⁸. The architectural changes and protein fusions used to develop the CGBEs in this study resulted in lower Cas9-dependent off-target editing compared to corresponding CGBEs lacking protein fusions (FIG. 72, FIGS. 76A-76B), despite their generally higher on-target editing, perhaps because the more complex fusions or architectural changes introduce additional conformational requirements in editor:DNA complexes that are not met by some off-target loci. CGBE off-target editing activity was examined at thirteen off-target loci for four sgRNAs (HEK site 2, HEK site 3, HEK site 4, and FANCF). On-target editing efficiency was confirmed and is shown in FIG. 72. While off-target editing varied by site, as has been reported previously¹⁷, the deaminase domain was the primary determinant of off-target editing activity. Across all cytidines assessed within a broadened search window (protospacer positions C1-C12) to capture all possible off-target edits, an average off-target nucleotide modification frequency of 5.9±0.5% for eA3A-nCas9, 6.4±0.3% for EE-nCas9, 11.9±0.9% for APOBEC1-nCas9, and 13.0±0.3% for Anc689-nCas9 was observed (FIGS. 76A-76B). Importantly, the average frequency of off-target in-window editing (any C•G to T•A, A•T, G•C, or indel at an in-window off-target cytosine) across the thirteen studied off-target loci was substantially decreased for our engineered CGBE variants tested compared to the corresponding simple deaminase-nCas9 fusions (FIGS. 76A-76B). For example, RBMX-eA3A-X-C showed a 4.5-fold reduction in off-target editing compared to eA3A-nCas9, while the RBMX-eA3A-X-HF construct, which has a slightly shifted editing window, showed a large 52-fold reduction relative to eA3A-nCas9. Among the 16 characterized CGBE variants containing protein fusions made in this study, off-target editing levels on average were 11.3-fold lower than the corresponding deaminase-nCas9.

[0639] Together, these results indicate that the novel protein fusion CGBEs developed herein offer lower Cas9-dependent off-target editing compared to corresponding CGBEs lacking those fusions, despite their generally higher on-target editing, perhaps because the more complex fusions introduce additional conformational requirements in editor:DNA complexes that are not met by some off-target loci.

[0640] Base editor off-target activity may also arise in a sgRNA-independent manner. Such edits are predominantly driven by the deaminase component; therefore, it is anticipated that sgRNA-independent off-target activity of CGBE will mirror that of the CBEs that use the same cytosine deaminase. While overexpression of fusion proteins, including DNA repair proteins, as CGBE-components may result in additional sgRNA-independent off-target effects, these are likely to differ, perhaps due to cell-type specific DNA repair profiles, and are therefore best assessed per application.

[0641] While DNA repair protein CGBE components may result in additional Cas-independent off-target effects, these are likely to differ by cell type and delivery method, and therefore are best assessed for each application.

### Discussion

[0642] Understanding and controlling the outcomes of genome editing experiments are important challenges for achieving targeted, precise genome manipulation. Molecular determinants of transversion base editing was investingated, including the effects of the deaminase and Cas effector domains, as well as many DNA repair proteins, and these insights were used to engineer novel CGBEs. The editing outcomes and performance of these reagents were characterized using a high-throughput genome-integrated library assay in mammalian cells and sequence features that affect base editing outcomes of ten diverse CGBEs were identified. It was shown that C-to-G editing activity was predicted with substantially higher accuracy by deep learning models compared to simpler models, indicating that complex sequence features drive C•G-to-G•C editing activity.

[0643] Provided herein are trained CGBE-Hive machine learning models which accurately predict CGBE efficiency, C•G-to-G•C editing purity, and bystander editing patterns (R=0.90) to enable predictable and consistently pure CGBE editing. A machine learning workflow was demonstrated using CGBE-Hive to identify optimal CGBE and sgRNA editing strategies to install a desired edit and show that this workflow expands high-efficiency and high-purity C•G-to-G•C editing to more loci than using any single CGBE by 5.0-fold and 4.1-fold with the top three CGBE-nominated choices. CGBE-mediated correction of the amino acid sequences of 546 disease-associated single nucleotide variants (SNVs) was demonstrated with >90% precision. Furthermore, efficient and pure installation of four disease-relevant SNPs was demonstrated and the performance of these tools was tested in other mammalian cell lines. Collectively, the base editor and computational tools presented herein substantially improve the targeting scope, effectiveness, and utility of CGBE-mediated transversion base editing.

### Data and Code Availability

[0644] The target library sequencing data generated during this study are available at the NCBI Sequence Read Archive database under PRJNA631290. Data from the Repair-seq screens are available under PRJNA721212. Processed target library data used for training machine learning models have been deposited under the following DOIs: 10.6084/m9.figshare.12275645 and 10.6084/m9.figshare.12275654.

### Code Availability

[0645] Code used for analyzing CRISPRi screens is available at github.com/jeffhussmann/repair-seq. Code used for target library data processing and analysis are available at github.com/maxwshen/lib-dataprocessing and github.com/maxwshen/lib-analysis. The machine learning models for CGBEs trained on target library data are available as a part of the BE-Hive interactive web application at crisprbehive.design and the BE-Hive Python package at github.com/maxwshen/be_predict_efficiency.

### Methods

### General Methods

[0646] DNA oligonucleotides were obtained from Integrated DNA Technologies (except where otherwise specified). All mammalian editor plasmids used in this work were cloned by Gibson assembly according to manufacturer's protocols. Except for the CRISPRi library, plasmids expressing sgRNAs were constructed by ligation of annealed oligonucleotides into BsmBI-digested acceptor vector as previously described^{18,19}. Plasmids expressing pegRNAs were constructed by Golden Gate assembly using a custom acceptor plasmid as previously described¹⁵. Protospacer sequences of sgRNAs used for non-library experiments in this work are listed in Table 6. pegRNA protospacer and extension sequences are listed in Table 5. Vectors for low-throughput mammalian cell experiments were purified using Plasmid Plus Midiprep kits (Qiagen) or PureYield plasmid miniprep kits (Promega), which include endotoxin removal steps. Cloning of the CBE SaCas9 sgRNA for screening was conducted by KLD assembly according to the manufacturer's protocol using BPK2660 (Addgene #70709) as a template with the following primers: GGTGTTTCGTCCTTTCCACAAGATA (SEQ ID NO: 224), gCTGATAGGCAGCCTGCACTGGGTTTTAGTACTCTGTAATGAAAATTACAGAATC TAC (SEQ ID NO: 225).

### General Mammalian Cell Culture Conditions

[0647] HEK293T (ATCC CRL-3216), U20S (ATTC HTB-96), K562 (CCL-243), and HeLa(CCL-2) cells were cultured and passaged in Dulbecco's Modified Eagle's Medium (DMEM) plus GlutaMAX (ThermoFisher Scientific), DMEM (Gibco), McCoy's 5A Medium (Gibco), RPMI Medium 1640 plus GlutaMAX (Gibco), or Eagle's Minimal Essential Medium (EMEM, ATCC), respectively, each supplemented with ˜10% (v/v) fetal bovine serum (Gibco, qualified) and 1× Penicillin Streptomycin (Corning). All cell types were incubated, maintained, and cultured at 37° C. with 5% C02. Cell lines were authenticated by their respective suppliers or short tandem repeat profiling and tested negative for mycoplasma. Culturing conditions for library analyses are detailed below. Lentivirus was produced in HEK293T cells by co-transfection with packaging plasmids encoding gag and pol, rev, and tat from HIV-1 and VSVG envelope protein. For these transfections, either TranslT®-LT1 Transfection Reagent (Mirus) or Polyethylenimine (PEI; Polysciences, Inc.) were used.

### HEK293T Tissue Culture Transfection (Non-Viral) Protocol and Genomic DNA Preparation

[0648] HEK293T were cells grown, seeded, and transfected as previously described^{5,6,15,18-20}. Briefly, cells were trypsinized and seeded on 48-well poly-D-lysine coated plates (Corning) to an approximated of 3×105 cells per well. 16-24 h post-seeding, cells were transfected at approximately 60% confluency with 1 μL of Lipofectamine 2000 (Thermo Fisher Scientific) according to the manufacturer's protocols and 750 ng of base editor plasmid and 250 ng of sgRNA plasmid. For Prime editing experiments, non-nicking conditions were carried out with 750 ng of PE2 and 250 ng pegRNA while nicking experiments included an additional 83 ng of nicking sgRNA. 72 h post-transfection, media was removed, cells were washed with 1×PBS solution (Thermo Fisher Scientific), and genomic DNA was extracted by the addition of 150 μL of freshly prepared lysis buffer (10 mM Tris-HCl, pH 7.5; 0.05% SDS; 25 μg/mL Proteinase K (ThermoFisher Scientific)) directly into each well of the tissue culture plate. The genomic DNA•lysis buffer mixture was incubated at 37° C. for 1 h, followed by an 80° C. enzyme inactivation step for 30 min. Primers used for mammalian cell genomic DNA amplification are listed in Table 6. Protospacer sequences used for each locus are listed in Table 6.

### High-Throughput DNA Sequencing of Genomic DNA Samples

[0649] Genomic sites of interest were amplified from genomic DNA prepared and sequenced on an Illumina MiSeq as previously described^{5,6,15,18-20} with minor modifications. Briefly, amplification primers containing Illumina forward and reverse adapters (Table 6) were used for PCR 1, amplifying the genomic region of interest. PCR 1 reactions were performed with 0.5 μM of each forward and reverse primer, 1 μL of genomic DNA extract, 3% DMSO, 0.25 μL Phusion HS-II polymerase, 5 μL Phusion HF buffer, 0.5 μL 10 mM dNTPs, and water to a final volume of 25 μL. PCR1 reactions were carried out as follows: 98° C. for 2 min, then 32 cycles of [98° C. for 10 s, 61° C. for 20 s, and 72° C. for 30 s], followed by a final 72° C. extension for 2 min. Unique Illumina barcoding primer pairs were added to each sample in a secondary PCR reaction (PCR 2). Specifically, 25 μL of a given PCR 2 reaction contained 0.5 μM of each unique forward and reverse Illumina barcoding primer pair, 1 μL of unpurified PCR 1 reaction mixture, 0.25 μL Phusion HS-II polymerase, 5 μL Phusion HF buffer, 0.5 μL 10 mM dNTPs, and water to a final volume of 25 μL. The barcoding PCR 2 reactions were carried out as follows: 98° C. for 2 min, then 12 cycles of [98° C. for 10 s, 61° C. for 20 s, and 72° C. for 30 s], followed by a final 72° C. extension for 2 min. PCR products were evaluated by electrophoresis on 2% agarose gel. PCR 2 products (pooled by common amplicons) were purified by electrophoresis with a 2% agarose gel using a QIAquick Gel Extraction Kit (Qiagen), eluting with 40 μL of water. DNA concentration and library preparation was performed as previously described¹⁵ by fluorometric quantification (Qubit, ThermoFisher Scientific) and diluted to 4 nM final library concentration before sequencing on an Illumina MiSeq instrument according to the manufacturer's protocols.

[0650] Sequencing reads were demultiplexed using MiSeq Reporter (Illumina). Alignment of amplicon sequences to a reference sequence was performed using CRISPResso221 which was run to calculate indels with a window size of 10. C•G-to-G•C editing purity was calculated as C•G-to-G•C editing yield÷[C•G-to-T•A yield+C•G-to-A•T yield+indels].

### Nucleofection of HAP1, U2OS, K562, and HeLa Cells

[0651] Nucleofection was performed on K562, HeLa, and U20S cells as previously described¹⁵. 750ng of base editor-expression plasmid and 250ng sgRNA-expression plasmid were nucleofected in a final volume of 20 uL in a 16-well nucleocuvette strip (Lonza). K562 cells were nucleofected using the SF Cell Line 4D-Nucleofector X Kit (Lonza) with

[0652] 5×10⁵ cells per sample (program FF-120), according to the manufacturer's protocol. U20S cells were nucleofected using the SE Cell Line 4D-Nucleofector X Kit (Lonza) with 3-4×10⁵ cells per sample (program DN-100), according to the manufacturer's protocol. HeLa cells were nucleofected using the SE Cell Line 4D-Nucleofector X Kit (Lonza) with 2×10⁵ cells per sample (program CN-114), according to the manufacturer's protocol. Nucleofiection of HAP1 cells was performed using the same amounts of DNA and final volume in a 16-well nucelocuvette strip; however, HAP1 cells were nucleofected using the SE Cell Line 4D-Nucleofector X Kit (Lonza) with 4×105 cells per sample (program DZ-113), according to the manufacturer's protocol. Cells were harvested 72 hours after nucleofection for genomic DNA extraction.

### Selection of Ten CGBEs for Target Library Characterization

[0653] The most representative and diverse subset of CGBEs were selected from endogenous base editing data for 72 CGBEs at eight or 16 endogenous target loci. Briefly, a convex relaxation of a quadratic program was used to find a subset of CGBEs with maximally diverse transversion editing purities and yields. Clustering analysis was used to suggest the number of unique CGBE families. Analytic results were curated manually. The six fusion CGBEs assayed were: PolD2-APOBEC1-UDGX-Cas9-UDGX, RBMX-eA3A-UDGX-Cas9, RBMX-eA3A-UDGX-HF-nCas9, UDGX-Anc689-UDGX-Cas9-RBMX, UDGX-APOBEC1-UDGX-HF-nCas9, and UDGX-EE-UDGX-Cas9-UDGX. The four simple CGBE editors were deaminase-nCas9 with eA3A, Anc689, APOBEC1, and EE deaminases. eA3A-T31A-nCas9 and eA3A-BEN3-ΔN13-UGI were also assayed. eA3A-nCas9, eA3A-T31A-nCas9 and eA3A-BEN3-ΔN13-UGI were characterized in the comprehensive context library only in HEK293T, while all other CGBEs were characterized in the comprehensive context library only in mESCs. eA3A-nCas9-NG and eA3A-T31A-nCas9-NG were further characterized in the transversion-enriched SNV library in mESCs.

[0654] To identify CGBEs with distinct activities, quadratic programming was used to identify a subset of CGBEs with maximum pairwise distances between vectors of C•G-to-G•C editing purity and yield across eight or 16 endogenous loci. Hierarchical clustering was also performed, and it was observed that across these endogenous loci, CGBE editing activity primarily clustered by deaminase, though there were also substantial intra-cluster differences in editing activities due to variety in protein fusion architectures that were occasionally larger than inter-cluster differences, which indicates that CGBE editing activity is affected by both deaminase and protein fusion architectures. As the quadratic programming and clustering methods only consider numerical distances and do not propose subsets optimized for high purity or yield, the quadratic programming results were manually curated by replacing CGBEs with similar neighbors from hierarchical clustering when the neighbors had meaningfully higher purity or yield. Since deaminases, protein fusions, and high-fidelity Cas9 variants are known to alter base editing activity^{2-4,8,22}, the final subset was also manually curated to ensure a diversity of these elements.

### CRISPRi Library Construction

[0655] For the CRISPRi screen a platform called Repair-seq was used, which was developed by Hussmann et al. using a CRISPRi guide library (see Hussmann et al., Cell (2021) 184(22), 5653-5669.e25, which is incorporated by reference herein). This library contains 1513 gene-targeting sgRNAs selected from hCRISPRi-v2.1²³ and 60 non-targeting controls selected from hCRISPRi-v2²³. Gene-targeted sgRNAs were against 476 genes enriched for ones involved in DNA metabolic processes (e.g., replication, repair, recombination). A minority of the spacer sequences for the gene-targeting sgRNAs in this library were repeated in hCRISPRi-v2.1 and are therefore annotated as targeting multiple gene promoters, with multiple guide identifiers. The 476 gene count considers only the first set of annotations. Oligonucleotides containing sgRNA targeting sequences were synthesized by Twist Bioscience.

### CRISPRi Library Cloning

[0656] The guide library was cloned in pAX198 as previously described in Hussmann et al. (2021). This vector was derived from pU6-sgRNA EF1Alpha-puro-T2A-BFP24 (Addgene, 60955) through multi-step molecular cloning. pAX198 contains a CRISPRi guide expression cassette driven by a modified mouse U6 promoter and ending with a termination signal consisting of 6 Ts. pAX198 also contains a ‘target region’ for genome editing derived from sequence at the human HBB gene, specifically the second and third exons of HBB (no intron) and part of the 3′UTR (ENST00000647020.1). This region is where Anc689-nCas9 and Anc589-dCas9 were directed (see CRISPRi screen cell culture section of Methods). Prior to library cloning, a BstXI site was removed from the target region by site-directed mutagenesis. Library cloning was performed with standard protocols (details available at weissmanlab.ucsf.edu/CRISPR/Pooled_CRISPR_Library_Cloning.pdf). Briefly, library oligonucelotides were amplified by PCR (primers 5′-TATGAACCACTAAGGCGTCCAC (SEQ ID NO: 226), 5′-TCACCAGCAGACTTTACGCAGC (SEQ ID NO: 227)), purified using MinElute Reaction Cleanup Kit (Qiagen), digested with BlpI and BstXI, isolated by gel purification, and ligated into a similarly digested expression vector (insert to backbone ratio of 1:1 for 16 hours at 16° C.). Ligation reactions were electroporated into MegaX DH10B T1R Electrocomp™ cells (ThermoFisher). Cells were grown on agar plates and then scraped into liquid for plasmid purification. The final sgRNA library (AX227) was verified by sequencing.

### CRISPRi Screen Cell Culture

[0657] The Repair-seq screens reported here were performed in previously described HeLa cells25, which stably express a dCas9-BFP-KRAB fusion (from pHR-SFFV-dCas9-BFP-KRAB; Addgene #46911), in two rounds. The first round of screening evaluated Anc689-nCas9. The second round evaluated Anc689-dCas9. Both rounds of screening were conducted as follows: Cells were transduced with guide library (AX227, see CRISPRi library cloning section below) by lentiviral infection. The infections were carried out in DMEM supplemented with ˜10% (v/v) fetal bovine serum, lx Penicillin Streptomycin, and 8 μg/mL polybrene at an observed infection efficiency of ˜5% for both Anc689-nCas9 and Anc689-dCas9, as determined by flow cytometry. Approximately 2 days post transduction, cells were selected in 3 μg/mL puromycin and then, 3 days later, transfected with plasmids for base editing. Each screen was performed in replicates, each split one day prior to transfection onto 30 15 cm plates, each containing ˜1.2×10⁶ cells. The transfection procedure was as follows: (1) 25 ng plasmid DNA (75% editor plasmid; 25% sgRNA plasmid) was mixed with 3.5 mL of Opti-MEM (Gibco) and 4.6 mL Helafect Transfection Reagent (per 15 cm plate of cells). (2) This mixture was then incubated at room temperature for 20 minutes and (3) added to DMEM (Gibco) supplemented with ˜10% (v/v) fetal bovine serum (20 mL per plate). (4) The prepared media was then used to replace non-transfection media on each plate of cells. Approximately 3 days later, cells were collected for sample preparation. For all arms of screening, ˜100×10⁶ cells or more were collected at a viability of >85%.

### CRISPRi Screen Sample Preparation

[0658] Sequencing libraries were prepared from cells collected at the end of the CRISPRi screens as follows: Genomic DNA was extracted from cell pellets (-200×10⁶ cells for each replicate of Anc689-nCas9, and 125×10⁶ and 98×10⁶ cells for each of two replicates of Anc589-dCas9) using the NucleoSpin® Blood XL kit (Macherey-Nagel, up to 100×10⁶ cells per column). The genomic DNA was fragmented by digestion with NotI-HF (NEB) and then enriched for edit-containing fragments (1447 bp) by size selecting each sample on a large 0.8% agarose gel (Owl™ A1 Large Gel System, Thermo Fisher Scientific). Gel electrophoresis was conducted at large-scale (i.e., with wells large enough to hold 1.5 mL volume per well) to maximize recovery of fragments containing both edited sequences and sgRNA expression cassettes (‘target’ fragments). Gel preparation details are available at https://weissmanlab.ucsf.edu/CRISPR/IlluminaSequencingSamplePrep_old.pdf. DNA was then isolated from excised regions of the gel using NucleoSpin® Gel and PCR Clean-up kit (Macherey-Nagel) with columns placed on a vacuum manifold. Of note, large sample volumes were passed through individual columns using syringe barrels to increase capacity.

[0659] Next, size-selected target fragments were prepared for sequencing using custom adaptors compatible with next-generation sequencing technologies from Illumina. These adapters, which contained 12 nt unique molecular identifiers (UMIs), were made by annealing individual DNA oligonucleotides (obtained from Integrated DNA Technologies). The oligonucleotide components were oBA676 (5′-G*G*C*C*AGATCGGAAGAGCGTCGTGTAGGGAAAGAGTGTAGATCTCGGTGGTC GCCGTATCATT (SEQ ID NO: 228), HPLC purified) and oBA677 (5′-CAAGCAGAAGACGGCATACGAGATNNNNNNNNNNNNGTGACTGGAGTTCAGAC GTGTGCTCTTCCGATCT (SEQ ID NO: 229), HPLC purified), where * represents a phosphorothioated DNA base. Prior to ligation, DNA samples were digested with HindIII-HF (NEB). This step removed a 4 nt NotI overhang from one end of the target fragments, leaving only one side available for adaptor ligation. DNA was then purified using SPRIselect Reagent (Beckman Coulter) in a 0.8X reaction, quantified using Bioanalyzer High Sensitivity DNA Analysis (Agilent), and 1 μg of the product was ligated to adaptors using enzyme and buffer from the KAPA HyperPrep Kit (Roche) as follows: 30 μL ligation buffer, 10 μL ligase, adapter at 200:1 adaptor:insert ratio, and PCR-grade water to 110 μL total volume. These reactions were incubated at 4° C. overnight on a thermocycler with lid temperature set to 30° C.

[0660] Following ligation, DNA was purified using SPRIselect Reagent (Beckman Coulter) in two reactions (0.65× followed by 0.8×) and target fragments were enriched by PCR as follows: 30 ng of template, amplification primers at 0.6 μM final concentration (each), 3% dimethyl sulfoxide, and 1×KAPA HiFi HotStart ReadyMix (50 μL total volume) run at 1 cycle of 3 minutes at 95° C.; 16 cycles of 15 seconds at 98° C., followed by 15 seconds at 70° C.; 1 cycle of 1 minute at 72° C.; 4° C. hold. Enough PCR reactions were performed to use nearly the entirety of each sample obtained from the ligation and subsequent clean-up reactions. Amplification primers used were oBA679 (5′-CAAGCAGAAGACGGCATACGAGAT (SEQ ID NO: 230)) and 5′-AATGATACGGCGACCACCGAGATCTACAC-[index]-TCGTCGGCAGCGTCAGATGTGTATAAGAGACAGTATCCCTTGGAGAACCACCTTG TTGG (SEQ ID NO: 231). Amplified DNA was purified using SPRIselect Reagent (Beckman Coulter) in a 0.8× reaction, and index samples were mixed for sequencing. Throughout sample preparation procedures, samples were checked for quality and yield using either a NanoDrop Spectrophotometers (Thermo Fisher Scientific), Agilent 2100 Bioanalyzer system, or by running on a Novex™ TBE Gel. Sample preparation procedures are also described in Hussmann et al. (2021).

### CRISPRi Screen Analysis

[0661] Sequencing of CRISPRi screens, alignment and classification of screen sequencing data, statistical tests of gene significance in FIG. 57D and FIGS. 65A-65E, and identification of the top two most active guide RNAs for relevant genes in FIG. 57D and FIGS. 66A-66b were performed as described in Hussmann et al. (2021). Intervals in FIG. 64C are 95% Clopper-Pearson intervals of outcome fractions, converted to corresponding log 2 fold changes. That is, given k observed UMIs for a given CRISPRi guide in a numerator outcome set out of n total UMIs in a denominator outcome superset, the bottom interval (vbottom) is the smallest value of the true population proportion of numerator to denominator outcomes such that there is <=2.5% chance of observing >=k from Binomial(vbottom, n), and the top interval (vtop) is the largest value of the true population proportion of numerator to denominator outcomes such that there is <=2.5% chance of observing <=k from Binomial(vtop, n).

### Target Library Cloning

[0662] The target libraries used in this manuscript were previously generated in Arbab, Shen, et al., 2020¹², which is incorporated by reference herein. All editors described in this paper were cloned between the N-terminal and C-terminal NLS sequences flanking the eA3A-BE4max (Addgene 152997).

### Target Library Cell Culture

[0663] mESC lines used have been described previously and were cultured as described previously²⁶. For stable Tol2 transposon-mediated library integration, cells were transfected using Lipofectamine 3000 (Thermo Fisher) following standard protocols with equimolar amounts of Tol2 transposase plasmid and transposon-containing plasmid. For library applications, 15-cm plates with 2×107 initial cells were used. To generate library cell lines with stable Tol2-mediated genomic integration, cells were selected with 150 μg/mL hygromycin starting the day after transfection and continued for >2 weeks. For editing experiments, CGBEs were transfected with Tol2 transposase plasmid using Lipofectamine 3000 and selected with 10 μg/mL blasticidin starting the day after transfection for 4 days before harvesting. An average coverage of >300× per library cassette was maintained throughout.

### Target Library High-Throughput Sequencing

[0664] Library preparation was performed as described in Arbab, Shen et al. 20208. Genomic DNA was collected from cells 5 days after transfection, after 4 days of antibiotic selection. For library samples, 20 μg gDNA was used for each sample and an average sequencing depth of >4,000× per target was maintained. All PCRs were performed using NEBNext Ultra II Q5 Master Mix. Samples were pooled using Tape Station (Agilent) and quantified using a KAPA Library Quantification Kit (KAPA Biosystems). The pooled samples were sequenced using Illumina NextSeq.

### Target Library Analysis: Data Processing

[0665] Sequencing reads were assigned to designed library target sites by locality sensitive hashing^{8,27}. Target contexts that were intentionally designed to be highly similar to each other were designed barcodes to assist accurate assignment. Sequence alignment was performed using Smith-Waterman with the parameters: match +1, mismatch −1, indel start −5, indel extend 0. Nucleotides with PHRED score below 30 were assumed to be the reference nucleotide.

[0666] For base editing analysis, aligned reads with no indels were retained for analysis and events were defined as the combination of all possible substitutions at all substrate nucleotides in the target site in a read, where a single sequencing read corresponds to an observation of a single event. Substrate nucleotides were defined as C and G for CBEs and A and C for ABEs.

[0667] For indel analysis, reads containing indels with at least one indel position occurring between protospacer positions ˜6 to 26 were retained, where position 1 is the 5′-most nucleotide of the protospacer, and 0 is used to refer to the position between −1 and 1. Reads containing indels without at least six nucleotides with at least 90% match frequency on both sides of each indel were discarded. Events were defined as indels identified by position, length, and inserted nucleotides occurring in a read. Combination indels were either not observed at all or only at exceedingly low frequencies in endogenous data and were therefore excluded from consideration when analyzing library data.

### Target Library Analysis: Base Editing Profiles

[0668] Base editing profiles were calculated using the same approach as Arbab¹², using a multi-step procedure to maximize sensitivity. Briefly, single-nucleotide mutation frequencies were tabulated at each target position from sequence alignments in treatment and control data. Treatment data was adjusted for 1) background mutations using untreated control data, 2) sequencing errors, 3) batch effects using other treatment data including published data from Arbab¹², which primarily helped adjust for rare substitution artifacts from library construction. Mutations were then identified that occurred consistently for any editor across replicates to build base editing profiles with sufficient sensitivity to detect rare mutations. Cytosine base editing activity was defined as C to A, G, or T at positions −9 to 20 and G to A or C at positions −9 to 5. For all analysis in this work that required tabulating reads with base editing activity, reads that did not have base editing activity according to these broad profiles were discarded. Window sizes were calculated at 50% or greater efficiency relative to the position-wise maximum.

### Target Library Analysis: Calculating Efficiency and Purity

[0669] A minimum of 100 reads was required for calculating editing efficiency, and a minimum of 100 edited reads to calculate purity of editing outcomes. Library members not satisfying these criteria were filtered. The resulting efficiency and purity values were reported as data in the manuscript, and used to train machine learning models. Calculated editing efficiencies and purities were not adjusted for batch effects: instead, the efficiency model is designed to account for batch variation in baseline editing efficiencies by taking it in as optional input. Bystander editing patterns were not found to vary substantially by batch (Arbab).

### Target Library Analysis: Clustering

[0670] CGBEs transversion purities at (target site, nucleotide) tuples in the comprehensive context library were tabulated, and pairwise distances between CGBEs were calculated as the variance explained (R2) between each pair of CGBEs. Clustering was performed using the L1 distance metric between vectors with the UPGMA clustering algorithm (average linkage).

Target Library Analysis: Identifying Targets with Diverse Editing Outcomes

[0671] A “diversity score” was calculated for a target site and substrate nucleotide given observed editing activity values (yield or purity) by a panel of base editors. For a vector of observed values denoted x, the diversity score was defined as max(x)+2*std(x). Max(x) was included in the score function to encourage library members with very high and very low values to be considered diverse.

[0672] To explore the possibility that observed diversity of transversion purity could be explained by analyzing low-abundance outlier library members, the relationship between the diversity of transversion purity and library member abundance in the transversion-enriched SNV library was investigated. A diversity score was calculated for each library member, where large values indicate that different CGBEs had different transversion editing purity at that target. The relative abundance of each library member in the sequencing data was also calculated. If library members with extremely high diversity scores were associated with low relative abundance (e.g., if they were explainable by low coverage bottlenecking outliers), their relative abundances should be shifted relative to the background distribution.

[0673] This hypothesis was tested by comparing the distribution of relative abundance for the top 10 to top 50 library members ranked by diversity score to the full distribution of relative abundances. By Welch's T-Test, no statistical evidence that high-diversity library members had shifted relative abundance (P>0.40, N=4,000) was found. Furthermore, a mildly positive Pearson correlation (R=0.14, P=4×10-14) between relative abundance and the diversity score was observed, indicating that across the whole library, library members with higher relative abundance tend to have slightly higher diversity of base editing outcomes. Taken together with other analysis presented herein, it is concluded that differences in editing purity by different CGBEs at the same target are better explained by their distinct sequence preferences.

### Target Library Analysis: Sequence Motif Models

[0674] For prediction tasks where the target variable is continuous and has range in (0, 1), a logistic transformation was first applied to the data, then linear regression was used. For continuous data representing fractions, values equal to 0 or 1 were discarded. For classification tasks, the target variables were either 0 or 1 indicating absence or presence of activity, and logistic regression was used. Target variables included the efficiency of C•G-to-T•A editing by CBEs and the purity of cytosine transversions by CBEs. Each of these statistics involves calculating a denominator corresponding to the total number of reads at a target sequence, or the total number of edited reads at a target sequence not including indels. Target sequences with fewer than 100 reads in the denominator were discarded to ensure the accuracy of estimated statistics in the training and testing data. Features were obtained by one-hot-encoding nucleotides per position relative to a substrate nucleotide or to the protospacer. When featurizing data relative to a single substrate nucleotide, each substrate nucleotide within a specified range of positions was used. Ranges used included position 6 only (for the comprehensive context library that contained all NNN-NNN-mers surrounding position 6) and positions 4-8, which was used only when exploratory data analysis indicated that the activity of interest did not vary substantially by position. All nucleotides within a 10-bp radius of the target position were one-hot-encoded. Position was not used as a feature. The data were randomly split into training and test sets at an 80:20 ratio. It is noted that sequence motifs described by these regression models consider each position independently and are intended primarily for visualization.

[0675] Motifs for yield were calculated from the top 150 cytosines ranked by C-to-G yield. Column sizes are scaled by their information content.

### Target Library Analysis: Base Editing Efficiency Models

[0676] It was observed that base editing efficiency varies by experimental batch. To combine replicates across batches, mean centering and logit transformation was first performed at up to 10,638 gRNA-target pairs in each experimental condition separately from the 12kChar library which includes all 4-mers surrounding A or C from protospacer positions 1 to 11. Data at target sites with fewer than 100 total reads were discarded, then values were averaged at matched target sites across experimental replicates. Values of negative or positive infinity (resulting from logit of 0 or 1) were discarded. The data were randomly split into training and test sets at a ratio of 90:10. Each target site had a single output value corresponding to the mean logit fraction of sequenced reads with any base editing activity. Data points comprising a single replicate were assigned weight=0.5. Data points comprising multiple replicates were assigned a weight of the median logit variance divided by the logit variance at that data point, or 1, whichever value was smaller. In this manner, exactly half of the data points comprising multiple replicates were assigned a weight of 1, and those with higher variance were assigned a lower weight. Features were obtained from each target sequence using protospacer positions −9 to 21. Features included one-hot encoded single nucleotide identities at each position, one-hot encoded dinucleotides at neighboring positions, the melting temperature of the sequence and various subsequences, the total number of each nucleotide in the sequence, and the total number of G or C nucleotides in the sequence.

[0677] Gradient-boosted regression trees from the python package scikit-learn were used and trained with tuples of (x, y, weights) using the training data. Hyperparameter optimization was performed as described in Arbab⁸. 5-fold cross-validation was performed by splitting the training set into a training and validation set at a ratio of 8:1 and retained the combination of hyperparameters with the strongest average cross-validation performance as the final model. Models were trained in this manner for each combination of cell-type and base editor. Models were evaluated on the test set which was not used during hyperparameter optimization.

### Target Library Analysis: Bystander Editing Models

[0678] Bystander models were designed and trained using the same approach as Arbab. Briefly, a deep conditional autoregressive model that uses an input target sequence surrounding a protospacer and PAM to output a frequency distribution on combinations of base editing outcomes in the python package PyTorch28 was designed and implemented. The model predicts substitutions at cytosines and guanines for CBEs. The model transforms each substrate nucleotide and its local context using a shared encoder into a deep representation, then applies an autoregressive decoder that iteratively generates a distribution over base editing outcomes at each substrate nucleotide while conditioning on all previous generated outcomes. The encoder and decoder are coupled with a learned position-wise bias towards producing an unedited outcome. The model is trained on observed data by minimizing the KL divergence. Importantly, the conditional autoregressive design is sufficiently expressive to learn any possible joint distribution in the output space, thereby representing a powerful and general method for learning the editing tendencies of any base editor from data. A dataset was assembled where each sgRNA-target pair was matched with a table of observed base editing genotypes and their frequencies among reads with edited outcomes. Data points with fewer than 100 edited reads were discarded. Edited genotypes occurring at higher than 2.5% frequency with no edits at any substrate nucleotides (defined as C for CBEs and A for ABEs) in positions 1-10 were discarded. Data from multiple experimental replicates were combined by summing read counts for each observed genotype.

### Target Library Analysis: Performance Evaluation

[0679] Machine learning model performance was evaluated using held-out data. For evaluating models at predicting yield, the efficiency model was used to predict a base editing efficiency score using efficiency summary statistics (mean, std) from the training set. The predicted base editing efficiency with the predicted frequency of editing patterns was multiplied from the bystander model.

### Target Library Analysis: Indel Quantification

[0680] Indels were quantified using the same approach as Arbab⁸. Indels have strong batch effects in the library assay which can be adjusted within each connected component in the graph defined with nodes representing base editors and edges connecting base editors measured in the same experimental batch. Batch effects for eA3A-nCas9 were adjusted using two-way ANOVA as previously described since it was included in the same connected component as all BEs previously characterized in Arbab⁸. Batch effects for all other CGBEs were not able to be adjusted as they were in a separate connected component.

[0681] CGBEs are expected to generate indels at higher frequency than canonical base editors as a consequence of generating abasic sites more efficiently. Consistent with this expectation, it was previously observed lower base editing to indel (BE:indel) ratios at sites with higher transversion base editing activity. However, surprisingly, a positive correlation between BE:indel ratios and high C•G-to-G•C editing purity was observed among target library editing outcomes. The geometric mean BE:indel ratio for eA3A-nCas9 was 15:1 across all target sequences, lower than canonical CBEs at 40:18; however, upon close inspection, it was recognized that BE:indel ratios were split dependent upon whether the target sequence was edited with high or low purity. Indeed, the geometric mean BE:indel ratio was below this 15:1 ratio for sites with <40% C•G-to-G•C purity (decreases from 17:1 to 12:1 as editing purity increases from 0% to 40%) while the geometric average BE:indel ratio increased from 12:1 to 29:1 as C•G-to-G•C purity increased from 40% to 100%. This surprising positive correlation between BE:indel ratios and C•G-to-G•C purity was observed for 11 CGBEs across the comprehensive context and transversion-enriched libraries, with R=0.05 to 0.20 (P<2.4×10-6). No CGBE had a statistically significant negative correlation. This observation suggests that while abasic sites are a common precursor of both indel formation and C•G-to-G•C substitutions and that increased abasic site formation should lead to increases in both indels and C•G-to-G•C substitutions, target sites particularly amenable to highly pure C•G-to-G•C editing preferentially resolve abasic sites against indels. Taken together, these observations highlight the possibility of developing CGBEs with both highly pure C•G-to-G•C editing and high BE:indel ratios.

### Target Library Analysis: Evaluating CGBE-Hive Optimization of CGBEs for SNVs

[0682] Six CGBEs were used for this analysis: Anc689-nCas9-NG, APOBEC1-nCas9-NG, and eA3A-nCas9-NG, UdgX-Anc689-UdgX-nCas9-NG-RBMX, UdgX-APOBEC1-UdgX-nCas9-NG, and UdgX-APOBEC1-UdgX-HF-nCas9-NG. For each SNV, CGBE-Hive was used to identify which CGBE had the highest predicted genotype correction precision or amino acid correction precision among CGBEs that had data for that SNV, which was not always all six CGBEs, as some conditions had different SNVs filtered out due to low read counts or poor data quality. Only SNVs with data for at least three CGBEs were considered. The baseline used was the expectation of the statistic with respect to a uniform distribution over the six CGBEs for each SNV.

### Obtaining Biological Materials

[0683] Plasmids encoding CGBEs and CRISPRi screening materials are available through Addgene.

TABLE 5
Prime Editing oligonucleotides

| | |
|---|---|
| Name | Sequence |

pegRNA scaffold oligos (SEQ ID NOs: 232-233)

| | |
|---|---|
| pegRNA_scaffold_top | 5′phos- |
| | AGAGCTAGAAATAGCAAGTTAAAATAAGGCTAGTCCGTTATCAACTTGAAAAAGT |
| | GGCACCGAGTCG |
| pegRNA_scaffold_bottom | 5′phos- |
| | GCACCGACTCGGTGCCACTTTTTCAAGTTGATAACGGACTAGCCTTATTTTAACTTG |
| | CTATTTCTAG |

pegRNA spacer oligos (SEQ ID NOs: 234-245)

| | |
|---|---|
| HEK3_+1GtoC_spacer_top | caccGCTGCCATCACGTGCTCAGTCgtttt |
| HEK3_+1GtoC_spacer_bottom | ctctaaaacGACTGAGCACGTGATGGCAGC |
| HEK3_+13GtoC_spacer_top | caccGCTGGCCTGGGTCAATCCTTGgtttt |
| HEK3_+13GtoC_spacer_bottom | ctctaaaacCAAGGATTGACCCAGGCCAGC |
| FANCF_+5GtoC_spacer_top | caccGAGCGATCCAGGTGCTGCAGAgtttt |
| FANCF_+5GtoC_spacer_bottom | ctctaaaacTCTGCAGCACCTGGATCGCTC |
| RNF2_+14GtoC_spacer_top | caccGTACACGTCTCATATGCCCCTgtttt |
| RNF2_+14GtoC_spacer_bottom | ctctaaaacAGGGGCATATGAGACGTGTAC |
| HBB_+3GtoC_spacer_top | caccGTGCACCATGGTGTCTGTTTGgtttt |
| HBB_+3GtoC_spacer_bottom | ctctaaaacCAAACAGACACCATGGTGCAC |
| HBB_+16GtoC_spacer_top | caccGCTCAGGAGTCAGGTGCACCAgtttt |
| HBB_+16GtoC_spacer_bottom | ctctaaaacTGGTGCACCTGACTCCTGAGC |

sgRNA spacer oligos (SEQ ID NOs: 246-279)

| FANCF_nickA_top | caccGGAATCCGTTCTGCAGCACC | | |
|---|---|---|---|
| FANCF_nickA_bottom | aaacGGTGCTGCAGAACGGATTCC | | |
| FANCF_nickB_top | caccGCGCCGTCTCCAAGGTGAAAG | | |
| FANCF_nickB_bottom | aaacCTTTCACCTTGGAGACGGCGC | | |
| FANCF_nickC_top | caccGCAGAGAGTCGCCGTCTCCA | | |
| FANCF_nickC_bottom | aaacTGGAGACGGCGACTCTCTGC | | |
| FANCF_nickD_top | caccGCAGAGAGGCGTATCATTTCG | | |
| FANCF_nickD_bottom | aaacCGAAATGATACGCCTCTCTGC | | |
| HBB_nick2_top | caccGGGCTGGGCATAAAAGTCA | | |
| HBB_nick2_bottom | aaacTGACTTTTATGCCCAGCCC | | |
| HBB_nick3_top | caccGGAGGGCAGGAGCCAGGGCT | | |
| HBB_nick3_bottom | aaacAGCCCTGGCTCCTGCCCTCC | | |
| HBB_nickA_top | caccGCAACCTGAAACAGACACCA | | |
| HBB_nickA_bottom | aaacTGGTGTCTGTTTCAGGTTGC | | |
| HEK3_nick2_top | caccGACGCCCTCTGGAGGAAGCA | | |
| HEK3_nick2_bottom | aaacTGCTTCCTCCAGAGGGCGTC | | |
| HEK3_nick3_top | caccGCTGTCCTGCGACGCCCTC | | |
| HEK3_nick3_bottom | aaacGAGGGCGTCGCAGGACAGC | | |
| HEK3_nick5_top | caccGCACATACTAGCCCCTGTCT | | |
| HEK3_nick5_bottom | aaacAGACAGGGGCTAGTATGTGC | | |
| HEK3_nick6_top | caccGTCAACCAGTATCCCGGTGC | | |
| HEK3_nick6_bottom | aaacGCACCGGGATACTGGTTGAC | | |
| HEK3_nickA_top | caccGCAAGTAAGCATGCATTTGT | | |
| HEK3_nickA_bottom | aaacACAAATGCATGCTTACTTGC | | |
| HEK3_nickB_top | caccGGCCCAGAGTGAGCACGTGA | | |
| HEK3_nickB_bottom | aaacTCACGTGCTCACTCTGGGCC | | |
| HEK3_nickC_top | caccGCTGCCATCACGTGCTCACTC | | |
| HEK3_nickC_bottom | aaacGAGTGAGCACGTGATGGCAGC | | |
| RNF2_nick1_top | caccGTCAACCATTAAGCAAAACAT | | |
| RNF2_nick1_bottom | aaacATGTTTTGCTTAATGGTTGAC | | |
| RNF2_nick2_top | caccGTCTCAGGCTGTGCAGACAAA | | |
| RNF2_nick2_bottom | aaacTTTGTCTGCACAGCCTGAGAC | | |
| RNF2_nickA_top | caccGAATGACTAACATGACTGCCA | | |
| RNF2_nickA_bottom | aaacTGGCAGTCATGTTAGTCATTC | | |
| Name | Sequence | PBA | template |
| HEK3_+1GtoC_1_top | gtgcGGGCCCAGAGTGAGCACGT | 9 | 10 |
| HEK3_+1GtoC_1_bottom | aaaaACGTGCTCACTCTGGGCCC | 9 | 10 |
| HEK3_+1GtoC_2_top | gtgcTTGGGGCCCAGAGTGAGCACGT | 9 | 13 |
| HEK3_+1GtoC_2_bottom | aaaaACGTGCTCACTCTGGGCCCCAA | 9 | 13 |
| HEK3_+1GtoC_3_top | gtgcTCCTTGGGGCCCAGAGTGAGCACGT | 9 | 16 |
| HEK3_+1GtoC_3_bottom | aaaaACGTGCTCACTCTGGGCCCCAAGGA | 9 | 16 |
| HEK3_+1GtoC_4_top | gtgcAATCCTTGGGGCCCAGAGTGAGCACGT | 9 | 18 |
| HEK3_+1GtoC_4_bottom | aaaaACGTGCTCACTCTGGGCCCCAAGGATT | 9 | 18 |
| HEK3_+1GtoC_5_top | gtgcGGGCCCAGAGTGAGCACGTG | 10 | 10 |
| HEK3_+1GtoC_5_bottom | aaaaCACGTGCTCACTCTGGGCCC | 10 | 10 |
| HEK3_+1GtoC_6_top | gtgcTTGGGGCCCAGAGTGAGCACGTG | 10 | 13 |
| HEK3_+1GtoC_6_bottom | aaaaCACGTGCTCACTCTGGGCCCCAA | 10 | 13 |
| HEK3_+1GtoC_7_top | gtgcTCCTTGGGGCCCAGAGTGAGCACGTG | 10 | 16 |
| HEK3_+1GtoC_7_bottom | aaaaCACGTGCTCACTCTGGGCCCCAAGGA | 10 | 16 |
| HEK3_+1GtoC_8_top | gtgcAATCCTTGGGGCCCAGAGTGAGCACGTG | 10 | 18 |
| HEK3_+1GtoC_8_bottom | aaaaCACGTGCTCACTCTGGGCCCCAAGGATT | 10 | 18 |
| HEK3_+1GtoC_9_top | gtgcGGGCCCAGAGTGAGCACGTGAT | 12 | 10 |
| HEK3_+1GtoC_9_bottom | aaaaATCACGTGCTCACTCTGGGCCC | 12 | 10 |
| HEK3_+1GtoC_10_top | gtgcTTGGGGCCCAGAGTGAGCACGTGAT | 12 | 13 |
| HEK3_+1GtoC_10_bottom | aaaaATCACGTGCTCACTCTGGGCCCCAA | 12 | 13 |
| HEK3_+1GtoC_11_top | gtgcTCCTTGGGGCCCAGAGTGAGCACGTGAT | 12 | 16 |
| HEK3_+1GtoC_11_bottom | aaaaATCACGTGCTCACTCTGGGCCCCAAGGA | 12 | 16 |
| HEK3_+1GtoC_12_top | gtgcAATCCTTGGGGCCCAGAGTGAGCACGTGAT | 12 | 18 |
| HEK3_+1GtoC_12_bottom | aaaaATCACGTGCTCACTCTGGGCCCCAAGGATT | 12 | 18 |
| HEK3_+1GtoC_13_top | gtgcGGGCCCAGAGTGAGCACGTGATG | 13 | 10 |
| HEK3_+1GtoC_13_bottom | aaaaCATCACGTGCTCACTCTGGGCCC | 13 | 10 |
| HEK3_+1GtoC_14_top | gtgcTTGGGGCCCAGAGTGAGCACGTGATG | 13 | 13 |
| HEK3_+1GtoC_14_bottom | aaaaCATCACGTGCTCACTCTGGGCCCCAA | 13 | 13 |
| HEK3_+1GtoC_15_top | gtgcTCCTTGGGGCCCAGAGTGAGCACGTGATG | 13 | 16 |
| HEK3_+1GtoC_15_bottom | aaaaCATCACGTGCTCACTCTGGGCCCCAAGGA | 13 | 16 |
| HEK3_+1GtoC_16_top | gtgcAATCCTTGGGGCCCAGAGTGAGCACGTGATG | 13 | 18 |
| HEK3_+1GtoC_16_bottom | aaaaCATCACGTGCTCACTCTGGGCCCCAAGGATT | 13 | 18 |
| HEK3_+13GtoC_1_top | gtgcGTGCTCACTCTGGGCCCCAAGGATTGACC | 9 | 20 |
| HEK3_+13GtoC_1_bottom | aaaaGGTCAATCCTTGGGGCCCAGAGTGAGCAC | 9 | 20 |
| HEK3_+13GtoC_2_top | gtgcACGTGCTCACTCTGGGCCCCAAGGATTGACC | 9 | 22 |
| HEK3_+13GtoC_2_bottom | aaaaGGTCAATCCTTGGGGCCCAGAGTGAGCACGT | 9 | 22 |
| HEK3_+13GtoC_3_top | gtgcATCACGTGCTCACTCTGGGCCCCAAGGATTGACC | 9 | 25 |
| HEK3_+13GtoC_3_bottom | aaaaGGTCAATCCTTGGGGCCCAGAGTGAGCACGTGAT | 9 | 25 |
| HEK3_+13GtoC_4_top | gtgcGTGCTCACTCTGGGCCCCAAGGATTGACCCA | 11 | 20 |
| HEK3_+13GtoC_4_bottom | aaaaTGGGTCAATCCTTGGGGCCCAGAGTGAGCAC | 11 | 20 |
| HEK3_+13GtoC_5_top | gtgcACGTGCTCACTCTGGGCCCCAAGGATTGACCCA | 11 | 22 |
| HEK3_+13GtoC_5_bottom | aaaaTGGGTCAATCCTTGGGGCCCAGAGTGAGCACGT | 11 | 22 |
| HEK3_+13GtoC_6_top | gtgcATCACGTGCTCACTCTGGGCCCCAAGGATTGACCCA | 11 | 25 |
| HEK3_+13GtoC_6_bottom | aaaaTGGGTCAATCCTTGGGGCCCAGAGTGAGCACGTGAT | 11 | 25 |
| HEK3_+13GtoC_7_top | gtgcGTGCTCACTCTGGGCCCCAAGGATTGACCCAG | 12 | 20 |
| HEK3_+13GtoC_7_bottom | aaaaCTGGGTCAATCCTTGGGGCCCAGAGTGAGCAC | 12 | 20 |
| HEK3_+13GtoC_8_top | gtgcACGTGCTCACTCTGGGCCCCAAGGATTGACCCAG | 12 | 22 |
| HEK3_+13GtoC_8_bottom | aaaaCTGGGTCAATCCTTGGGGCCCAGAGTGAGCACGT | 12 | 22 |
| HEK3_+13GtoC_9_top | gtgcATCACGTGCTCACTCTGGGCCCCAAGGATTGACCCAG | 12 | 25 |
| HEK3_+13GtoC_9_bottom | aaaaCTGGGTCAATCCTTGGGGCCCAGAGTGAGCACGTGAT | 12 | 25 |
| HEK3_+13GtoC_10_top | gtgcGTGCTCACTCTGGGCCCCAAGGATTGACCCAGG | 13 | 20 |
| HEK3_+13GtoC_10_bottom | aaaaCCTGGGTCAATCCTTGGGGCCCAGAGTGAGCAC | 13 | 20 |
| HEK3_+13GtoC_11_top | gtgcACGTGCTCACTCTGGGCCCCAAGGATTGACCCAGG | 13 | 22 |
| HEK3_+13GtoC_11_bottom | aaaaCCTGGGTCAATCCTTGGGGCCCAGAGTGAGCACGT | 13 | 22 |
| HEK3_+13GtoC_12_top | gtgcATCACGTGCTCACTCTGGGCCCCAAGGATTGACCCAGG | 13 | 25 |
| HEK3_+13GtoC_12_bottom | aaaaCCTGGGTCAATCCTTGGGGCCCAGAGTGAGCACGTGAT | 13 | 25 |
| FANCF_+5GtoC_1_top | gtgcGAATCCGTTCTGCAGCACCT | 9 | 11 |
| FANCF_+5GtoC_1_bottom | aaaaAGGTGCTGCAGAACGGATTC | 9 | 11 |
| FANCF_+5GtoC_2_top | gtgcATGGAATCCGTTCTGCAGCACCT | 9 | 14 |
| FANCF_+5GtoC_2_bottom | aaaaAGGTGCTGCAGAACGGATTCCAT | 9 | 14 |
| FANCF_+5GtoC_3_top | gtgcTCATGGAATCCGTTCTGCAGCACCT | 9 | 16 |
| FANCF_+5GtoC_3_bottom | aaaaAGGTGCTGCAGAACGGATTCCATGA | 9 | 16 |
| FANCF_+5GtoC_4_top | gtgcACCTCATGGAATCCGTTCTGCAGCACCT | 9 | 19 |
| FANCF_+5GtoC_4_bottom | aaaaAGGTGCTGCAGAACGGATTCCATGAGGT | 9 | 19 |
| FANCF_+5GtoC_5_top | gtgcGAATCCGTTCTGCAGCACCTG | 10 | 11 |
| FANCF_+5GtoC_5_bottom | aaaaCAGGTGCTGCAGAACGGATTC | 10 | 11 |
| FANCF_+5GtoC_6_top | gtgcATGGAATCCGTTCTGCAGCACCTG | 10 | 14 |
| FANCF_+5GtoC_6_bottom | aaaaCAGGTGCTGCAGAACGGATTCCAT | 10 | 14 |
| FANCF_+5GtoC_7_top | gtgcTCATGGAATCCGTTCTGCAGCACCTG | 10 | 16 |
| FANCF_+5GtoC_7_bottom | aaaaCAGGTGCTGCAGAACGGATTCCATGA | 10 | 16 |
| FANCF_+5GtoC_8_top | gtgcACCTCATGGAATCCGTTCTGCAGCACCTG | 10 | 19 |
| FANCF_+5GtoC_8_bottom | aaaaCAGGTGCTGCAGAACGGATTCCATGAGGT | 10 | 19 |
| FANCF_+5GtoC_9_top | gtgcGAATCCGTTCTGCAGCACCTGG | 11 | 11 |
| FANCF_+5GtoC_9_bottom | aaaaCCAGGTGCTGCAGAACGGATTC | 11 | 11 |
| FANCF_+5GtoC_10_top | gtgcATGGAATCCGTTCTGCAGCACCTGG | 11 | 14 |
| FANCF_+5GtoC_10_bottom | aaaaCCAGGTGCTGCAGAACGGATTCCAT | 11 | 14 |
| FANCF_+5GtoC_11_top | gtgcTCATGGAATCCGTTCTGCAGCACCTGG | 11 | 16 |
| FANCF_+5GtoC_11_bottom | aaaaCCAGGTGCTGCAGAACGGATTCCATGA | 11 | 16 |
| FANCF_+5GtoC_12_top | gtgcACCTCATGGAATCCGTTCTGCAGCACCTGG | 11 | 19 |
| FANCF_+5GtoC_12_bottom | aaaaCCAGGTGCTGCAGAACGGATTCCATGAGGT | 11 | 19 |
| FANCF_+5GtoC_13_top | gtgcGAATCCGTTCTGCAGCACCTGGAT | 13 | 11 |
| FANCF_+5GtoC_13_bottom | aaaaATCCAGGTGCTGCAGAACGGATTC | 13 | 11 |
| FANCF_+5GtoC_14_top | gtgcATGGAATCCGTTCTGCAGCACCTGGAT | 13 | 14 |
| FANCF_+5GtoC_14_bottom | aaaaATCCAGGTGCTGCAGAACGGATTCCAT | 13 | 14 |
| FANCF_+5GtoC_15_top | gtgcTCATGGAATCCGTTCTGCAGCACCTGGAT | 13 | 16 |
| FANCF_+5GtoC_15_bottom | aaaaATCCAGGTGCTGCAGAACGGATTCCATGA | 13 | 16 |
| FANCF_+5GtoC_16_top | gtgcACCTCATGGAATCCGTTCTGCAGCACCTGGAT | 13 | 19 |
| FANCF_+5GtoC_16_bottom | aaaaATCCAGGTGCTGCAGAACGGATTCCATGAGGT | 13 | 19 |
| RNF2_+14GtoC_1_top | gtgcGACTAACATGACTGCCAAGGGGCATATGA | 9 | 20 |
| RNF2_+14GtoC_1_bottom | aaaaTCATATGCCCCTTGGCAGTCATGTTAGTC | 9 | 20 |
| RNF2_+14GtoC_2_top | gtgcAATGACTAACATGACTGCCAAGGGGCATATGA | 9 | 23 |
| RNF2_+14GtoC_2_bottom | aaaaTCATATGCCCCTTGGCAGTCATGTTAGTCATT | 9 | 23 |
| RNF2_+14GtoC_3_top | gtgcGGTAATGACTAACATGACTGCCAAGGGGCATATGA | 9 | 26 |
| RNF2_+14GtoC_3_bottom | aaaaTCATATGCCCCTTGGCAGTCATGTTAGTCATTACC | 9 | 26 |
| RNF2_+14GtoC_4_top | gtgcTCAGGTAATGACTAACATGACTGCCAAGGGGCATATGA | 9 | 29 |
| RNF2_+14GtoC_4_bottom | aaaaTCATATGCCCCTTGGCAGTCATGTTAGTCATTACCTGA | 9 | 29 |
| RNF2_+14GtoC_5_top | gtgcGACTAACATGACTGCCAAGGGGCATATGAG | 10 | 20 |
| RNF2_+14GtoC_5_bottom | aaaaCTCATATGCCCCTTGGCAGTCATGTTAGTC | 10 | 20 |
| RNF2_+14GtoC_6_top | gtgcAATGACTAACATGACTGCCAAGGGGCATATGAG | 10 | 23 |
| RNF2_+14GtoC_6_bottom | aaaaCTCATATGCCCCTTGGCAGTCATGTTAGTCATT | 10 | 23 |
| RNF2_+14GtoC_7_top | gtgcGGTAATGACTAACATGACTGCCAAGGGGCATATGAG | 10 | 26 |
| RNF2_+14GtoC_7_bottom | aaaaCTCATATGCCCCTTGGCAGTCATGTTAGTCATTACC | 10 | 26 |
| RNF2_+14GtoC_8_top | gtgcTCAGGTAATGACTAACATGACTGCCAAGGGGCATATGAG | 10 | 29 |
| RNF2_+14GtoC_8_bottom | aaaaCTCATATGCCCCTTGGCAGTCATGTTAGTCATTACCTGA | 10 | 29 |
| RNF2_+14GtoC_9_top | gtgcGACTAACATGACTGCCAAGGGGCATATGAGAC | 12 | 20 |
| RNF2_+14GtoC_9_bottom | aaaaGTCTCATATGCCCCTTGGCAGTCATGTTAGTC | 12 | 20 |
| RNF2_+14GtoC_10_top | gtgcAATGACTAACATGACTGCCAAGGGGCATATGAGAC | 12 | 23 |
| RNF2_+14GtoC_10_bottom | aaaaGTCTCATATGCCCCTTGGCAGTCATGTTAGTCATT | 12 | 23 |
| RNF2_+14GtoC_11_top | gtgcGGTAATGACTAACATGACTGCCAAGGGGCATATGAGAC | 12 | 26 |
| RNF2_+14GtoC_11_bottom | aaaaGTCTCATATGCCCCTTGGCAGTCATGTTAGTCATTACC | 12 | 26 |
| RNF2_+14GtoC_12_top | gtgcTCAGGTAATGACTAACATGACTGCCAAGGGGCATATGAGA | 12 | 29 |
| | C | | |
| RNF2_+14GtoC_12_bottom | aaaaGTCTCATATGCCCCTTGGCAGTCATGTTAGTCATTACCTGA | 12 | 29 |
| RNF2_+14GtoC_13_top | gtgcGACTAACATGACTGCCAAGGGGCATATGAGACGT | 14 | 20 |
| RNF2_+14GtoC_13_bottom | aaaaACGTCTCATATGCCCCTTGGCAGTCATGTTAGTC | 14 | 20 |
| RNF2_+14GtoC_14_top | gtgcAATGACTAACATGACTGCCAAGGGGCATATGAGACGT | 14 | 23 |
| RNF2_+14GtoC_14_bottom | aaaaACGTCTCATATGCCCCTTGGCAGTCATGTTAGTCATT | 14 | 23 |
| RNF2_+14GtoC_15_top | gtgcGGTAATGACTAACATGACTGCCAAGGGGCATATGAGACGT | 14 | 26 |
| RNF2_+14GtoC_15_bottom | aaaaACGTCTCATATGCCCCTTGGCAGTCATGTTAGTCATTACC | 14 | 26 |
| RNF2_+14GtoC_16_top | gtgcTCAGGTAATGACTAACATGACTGCCAAGGGGCATATGAGA | 14 | 29 |
| | CGT | | |
| RNF2_+14GtoC_16_bottom | aaaaACGTCTCATATGCCCCTTGGCAGTCATGTTAGTCATTACCT | 14 | 29 |
| | GA | | |
| HBB_+3GtoC_1_top | gtgcGCAACCTGAAACAGACACC | 9 | 10 |
| HBB_+3GtoC_1_bottom | aaaaGGTGTCTGTTTCAGGTTGC | 9 | 10 |
| HBB_+3GtoC_2_top | gtgcTAGCAACCTGAAACAGACACC | 9 | 12 |
| HBB_+3GtoC_2_bottom | aaaaGGTGTCTGTTTCAGGTTGCTA | 9 | 12 |
| HBB_+3GtoC_3_top | gtgcACTAGCAACCTGAAACAGACACC | 9 | 14 |
| HBB_+3GtoC_3_bottom | aaaaGGTGTCTGTTTCAGGTTGCTAGT | 9 | 14 |
| HBB_+3GtoC_4_top | gtgcGTTCACTAGCAACCTGAAACAGACACC | 9 | 18 |
| HBB_+3GtoC_4_bottom | aaaaGGTGTCTGTTTCAGGTTGCTAGTGAAC | 9 | 18 |
| HBB_+3GtoC_5_top | gtgcGCAACCTGAAACAGACACCAT | 11 | 10 |
| HBB_+3GtoC_5_bottom | aaaaATGGTGTCTGTTTCAGGTTGC | 11 | 10 |
| HBB_+3GtoC_6_top | gtgcTAGCAACCTGAAACAGACACCAT | 11 | 12 |
| HBB_+3GtoC_6_bottom | aaaaATGGTGTCTGTTTCAGGTTGCTA | 11 | 12 |
| HBB_+3GtoC_7_top | gtgcACTAGCAACCTGAAACAGACACCAT | 11 | 14 |
| HBB_+3GtoC_7_bottom | aaaaATGGTGTCTGTTTCAGGTTGCTAGT | 11 | 14 |
| HBB_+3GtoC_8_top | gtgcGTTCACTAGCAACCTGAAACAGACACCAT | 11 | 18 |
| HBB_+3GtoC_8_bottom | aaaaATGGTGTCTGTTTCAGGTTGCTAGTGAAC | 11 | 18 |
| HBB_+3GtoC_9_top | gtgcGCAACCTGAAACAGACACCATG | 12 | 10 |
| HBB_+3GtoC_9_bottom | aaaaCATGGTGTCTGTTTCAGGTTGC | 12 | 10 |
| HBB_+3GtoC_10_top | gtgcTAGCAACCTGAAACAGACACCATG | 12 | 12 |
| HBB_+3GtoC_10_bottom | aaaaCATGGTGTCTGTTTCAGGTTGCTA | 12 | 12 |
| HBB_+3GtoC_11_top | gtgcACTAGCAACCTGAAACAGACACCATG | 12 | 14 |
| HBB_+3GtoC_11_bottom | aaaaCATGGTGTCTGTTTCAGGTTGCTAGT | 12 | 14 |
| HBB_+3GtoC_12_top | gtgcGTTCACTAGCAACCTGAAACAGACACCATG | 12 | 18 |
| HBB_+3GtoC_12_bottom | aaaaCATGGTGTCTGTTTCAGGTTGCTAGTGAAC | 12 | 18 |
| HBB_+3GtoC_13_top | gtgcGCAACCTGAAACAGACACCATGG | 13 | 10 |
| HBB_+3GtoC_13_bottom | aaaaCCATGGTGTCTGTTTCAGGTTGC | 13 | 10 |
| HBB_+3GtoC_14_top | gtgcTAGCAACCTGAAACAGACACCATGG | 13 | 12 |
| HBB_+3GtoC_14_bottom | aaaaCCATGGTGTCTGTTTCAGGTTGCTA | 13 | 12 |
| HBB_+3GtoC_15_top | gtgcACTAGCAACCTGAAACAGACACCATGG | 13 | 14 |
| HBB_+3GtoC_15_bottom | aaaaCCATGGTGTCTGTTTCAGGTTGCTAGT | 13 | 14 |
| HBB_+3GtoC_16_top | gtgcGTTCACTAGCAACCTGAAACAGACACCATGG | 13 | 18 |
| HBB_+3GtoC_16_bottom | aaaaCCATGGTGTCTGTTTCAGGTTGCTAGTGAAC | 13 | 18 |
| HBB_+16GtoC_3_top | gtgcTAGCAACCTGAAACAGACACCATGGTGCACCTGA | 9 | 25 |
| HBB_+16GtoC_3_bottom | aaaaTCAGGTGCACCATGGTGTCTGTTTCAGGTTGCTA | 9 | 25 |
| HBB_+16GtoC_4_top | gtgcACTAGCAACCTGAAACAGACACCATGGTGCACCTGA | 9 | 27 |
| HBB_+16GtoC_4_bottom | aaaaTCAGGTGCACCATGGTGTCTGTTTCAGGTTGCTAGT | 9 | 27 |
| HBB_+16GtoC_5_top | gtgcTTCACTAGCAACCTGAAACAGACACCATGGTGCACCTGA | 9 | 30 |
| HBB_+16GtoC_5_bottom | aaaaTCAGGTGCACCATGGTGTCTGTTTCAGGTTGCTAGTGAA | 9 | 30 |
| HBB_+16GtoC_6_top | gtgcAACCTGAAACAGACACCATGGTGCACCTGAC | 10 | 21 |
| HBB_+16GtoC_6_bottom | aaaaGTCAGGTGCACCATGGTGTCTGTTTCAGGTT | 10 | 21 |
| HBB_+16GtoC_7_top | gtgcAGCAACCTGAAACAGACACCATGGTGCACCTGAC | 10 | 24 |
| HBB_+16GtoC_7_bottom | aaaaGTCAGGTGCACCATGGTGTCTGTTTCAGGTTGCT | 10 | 24 |
| HBB_+16GtoC_8_top | gtgcTAGCAACCTGAAACAGACACCATGGTGCACCTGAC | 10 | 25 |
| HBB_+16GtoC_8_bottom | aaaaGTCAGGTGCACCATGGTGTCTGTTTCAGGTTGCTA | 10 | 25 |
| HBB_+16GtoC_9_top | gtgcACTAGCAACCTGAAACAGACACCATGGTGCACCTGAC | 10 | 27 |
| HBB_+16GtoC_9_bottom | aaaaGTCAGGTGCACCATGGTGTCTGTTTCAGGTTGCTAGT | 10 | 27 |
| HBB_+16GtoC_10_top | gtgcTTCACTAGCAACCTGAAACAGACACCATGGTGCACCTGAC | 10 | 30 |
| HBB_+16GtoC_10_bottom | aaaaGTCAGGTGCACCATGGTGTCTGTTTCAGGTTGCTAGTGAA | 10 | 30 |
| HBB_+16GtoC_12_top | gtgcAGCAACCTGAAACAGACACCATGGTGCACCTGACT | 11 | 24 |
| HBB_+16GtoC_12_bottom | aaaaAGTCAGGTGCACCATGGTGTCTGTTTCAGGTTGCT | 11 | 24 |
| HBB_+16GtoC_14_top | gtgcACTAGCAACCTGAAACAGACACCATGGTGCACCTGACT | 11 | 27 |
| HBB_+16GtoC_14_bottom | aaaaAGTCAGGTGCACCATGGTGTCTGTTTCAGGTTGCTAGT | 11 | 27 |
| HBB_+16GtoC_17_top | gtgcAGCAACCTGAAACAGACACCATGGTGCACCTGACTC | 12 | 24 |
| HBB_+16GtoC_17_bottom | aaaaGAGTCAGGTGCACCATGGTGTCTGTTTCAGGTTGCT | 12 | 24 |
| HBB_+16GtoC_18_top | gtgcTAGCAACCTGAAACAGACACCATGGTGCACCTGACTC | 12 | 25 |
| HBB_+16GtoC_18_bottom | aaaaGAGTCAGGTGCACCATGGTGTCTGTTTCAGGTTGCTA | 12 | 25 |
| HBB_+16GtoC_19_top | gtgcACTAGCAACCTGAAACAGACACCATGGTGCACCTGACTC | 12 | 27 |
| HBB_+16GtoC_19_bottom | aaaaGAGTCAGGTGCACCATGGTGTCTGTTTCAGGTTGCTAGT | 12 | 27 |
| HBB_+16GtoC_20_top | gtgcTTCACTAGCAACCTGAAACAGACACCATGGTGCACCTGAC | 12 | 30 |
| | TC | | |
| HBB_+16GtoC_20_bottom | aaaaGAGTCAGGTGCACCATGGTGTCTGTTTCAGGTTGCTAGTG | 12 | 30 |
| | AA | | |
| HBB_+16GtoC_21_top | gtgcAACCTGAAACAGACACCATGGTGCACCTGACTCC | 13 | 21 |
| HBB_+16GtoC_21_bottom | aaaaGGAGTCAGGTGCACCATGGTGTCTGTTTCAGGTT | 13 | 21 |
| HBB_+16GtoC_22_top | gtgcAGCAACCTGAAACAGACACCATGGTGCACCTGACTCC | 13 | 24 |
| HBB_+16GtoC_22_bottom | aaaaGGAGTCAGGTGCACCATGGTGTCTGTTTCAGGTTGCT | 13 | 24 |
| HBB_+16GtoC_23_top | gtgcTAGCAACCTGAAACAGACACCATGGTGCACCTGACTCC | 13 | 25 |
| HBB_+16GtoC_23_bottom | aaaaGGAGTCAGGTGCACCATGGTGTCTGTTTCAGGTTGCTA | 13 | 25 |
| HBB_+16GtoC_24_top | gtgcACTAGCAACCTGAAACAGACACCATGGTGCACCTGACTCC | 13 | 27 |
| HBB_+16GtoC_24_bottom | aaaaGGAGTCAGGTGCACCATGGTGTCTGTTTCAGGTTGCTAGT | 13 | 27 |
| HBB_+16GtoC_25_top | gtgcTTCACTAGCAACCTGAAACAGACACCATGGTGCACCTGAC | 13 | 30 |
| | TCC | | |
| HBB_+16GtoC_25_bottom | aaaaGGAGTCAGGTGCACCATGGTGTCTGTTTCAGGTTGCTAGT | 13 | 30 |
| | GAA | | |

TABLE 6
On-Targets

| | Protospacer | Top Oligo | Bottom Oligo | HTS primer | HTS primer | |
|---|---|---|---|---|---|---|
| | (SEQ ID | (SEQ ID | (SEQ ID | (SEQ ID | (SEQ ID | |
| | NOs: | NOs: | NOs: | NOs: | NOs: | Amplicon for alignment |
| Site | 505-524) | 525-544) | 545-564) | 565-584) | 585-604) | (SEQ ID NOs: 605-624) |
| HEK2 | GAACACAA | caccGAA | aaacGCAG | ACACTCTT | TGGAGTTC | TGAATGGATTCCTTGGAAACAATGATAACA |
| | AGCATAGA | CACAA | TCTATGC | TCCCTACA | AGACGTGT | AGACCTGGCTGAGCTAACTGTGACAGCATG |
| | CTGC | AGCAT | TTTGTGT | CGACGCTC | GCTCTTCC | TGGTAATTTTCCAGCCCGCTGGCCCTGTAAA |
| | | AGACT | TC | TTCCGATC | GATCTTGA | GGAAACTGGAACACAAAGCATAGACTGCG |
| | | GC | | TNNNNCCA | ATGGATTC | GGGCGGGCCAGCCTGAATAGCTGCAAACAA |
| | | | | GCCCCATC | CTTGGAAA | GTGCAGAATATCTGATGATGTCATACGCAC |
| | | | | TGTCAAAC | CAATGA | AGTTTGACAGATGGGGCTGG |
| | | | | T | | |
| HEK | GGCCCAGA | caccGGC | aaacTCAC | ACACTCTT | TGGAGTTC | ATGTGGGCTGCCTAGAAAGGCATGGATGAG |
| SITE 3 | CTGAGCAC | CCAGA | GTGCTC | TCCCTACA | AGACGTGT | AGAAGCCTGGAGACAGGGATCCCAGGGAAA |
| | GTGA | CTGAG | AGTCTG | CGACGCTC | GCTCTTCC | CGCCCATGCAATTAGTCTATTTCTGCTGCAA |
| | | CACGT | GGCC | TTCCGATC | GATCTCCC | GTAAGCATGCATTTGTAGGCTTGATGCTTTT |
| | | GA | | TNNNNATG | AGCCAAAC | TTTCTGCTTCTCCAGCCCTGGCCTGGGTCAA |
| | | | | TGGGCTGC | TTGTCAAC | TCCTTGGGGCCCAGACTGAGCACGTGATG |
| | | | | CTAGAAAG | C | GCAGAGGAAAGGAAGCCCTGCTTCCTCCAG |
| | | | | G | | AGGGCGTCGCAGGACAGCTTTTCCTAGACA |
| | | | | | | GGGGCTAGTATGTGCAGCTCCTGCACCGGG |
| | | | | | | ATACTGGTTGACAAGTTTGGCTGGG |
| HEK4 | GGCACTGC | caccGGC | aaacCCAC | ACACTCTT | TGGAGTTC | GAACCCAGGTAGCCAGAGACCCGCTGGTCT |
| | GGCTGGAG | ACTGC | CTCCAG | TCCCTACA | AGACGTGT | TCTTTCCCCTCCCCTGCCCTCCCCTCCCTTCA |
| | GTGG | GGCTG | CCGCAG | CGACGCTC | GCTCTTCC | AGATGGCTGACAAAGGCCGGGCTGGGTGGA |
| | | GAGGT | TGCC | TTCCGATC | GATCTTCC | AGGAAGGGAGGAAGGGCGAGGCAGAGGGT |
| | | GG | | TNNNNGA | TTTCAACC | CCAAAGCAGGATGACAGGCAGGGGCACCGC |
| | | | | ACCCAGGT | CGAACGG | GGCGCCCCGGTGGCACTGCGGCTGGAGGT |
| | | | | AGCCAGA | AG | GGGGGTTAAAGCGGAGACTCTGGTGCTGTG |
| | | | | GAC | | TGACTACAGTGGGGGCCCTGCCCTCTCTGAG |
| | | | | | | CCCCCGCCTCCAGGCCTGTGTGTGTGTCTCC |
| | | | | | | GTTCGGGTTGAAAGGA |
| RNF2 | GTCATCTT | caccGTC | aaacCAGG | ACACTCTT | TGGAGTTC | ACGTCTCATATGCCCCTTGGCAGTCATCTTA |
| | AGTCATTA | ATCTTA | TAATGA | TCCCTACA | AGACGTGT | GTCATTACCTGAGGTGTTCGTTGTAACTCA |
| | CCTG | GTCATT | CTAAGA | CGACGCTC | GCTCTTCC | TATAAACTGAGTTCCCATGTTTTGCTTAATG |
| | | ACCTG | TGAC | TTCCGATC | GATCTACG | GTTGAGTTCCGTTTGTCTGCACAGCCTGAGA |
| | | | | TNNNNACG | TAGGAATT | CATTGCTGGAAATAAAGAAGAGAGAAAAAC |
| | | | | TCTCATAT | TTGGTGGG | AATTTTAGTATTTGGAAGGGAAGTGCTATGG |
| | | | | GCCCCTTG | ACA | TCTGAATGTATGTGTCCCACCAAAATTCCTA |
| | | | | G | | CGT |
| EMX1 | GAGTCCGA | caccGAG | aaacTTCT | ACACTCTT | GTGGGTTT | CAGCTCAGCCTGAGTGTTGAGGCCCCAGTG |
| | GCAGAAGA | TCCGA | TCTTCTG | TCCCTACA | TGGAGTTC | GCTGCTCTGGGGGCCTCCTGAGTTTCTCATC |
| | AGAA | GCAGA | CTCGGA | CGACGCTC | AGACGTGT | TGTGCCCCTCCCTCCCTGGCCCAGGTGAAGG |
| | | AGAAG | CTC | TTCCGATC | GCTCTTCC | TGTGGTTCCAGAACCGGAGGACAAAGTACA |
| | | AA | | TNNNNCAG | GATCTCTC | AACGGCAGAAGCTGGAGGAGGAAGGGCCT |
| | | | | CTCAGCCT | GTGGTTGC | GAGTCCGAGCAGAAGAAGAAGGGCTCCCA |
| | | | | GAGTGTTG | | TCACATCAACCGGTGGCGCATTGCCACGAA |
| | | | | A | | GCAGGCCAATGGGGAGGACATCGATGTCAC |
| | | | | | | CTCCAATGACTAGGGTGGGCAACCACAAAC |
| | | | | | | CCACGAG |
| FANCF | GGAATCCC | caccGGA | aaacGGTG | ACACTCTT | TGGAGTTC | GGGGTCCCAGGTGCTGACGTAGGTAGTGCT |
| | TTCTGCAG | ATCCCT | CTGCAG | TCCCTACA | AGACGTGT | TGAGACCGCCAGAAGCTCGGAAAAGCGATC |
| | CACC | TCTGCA | AAGGGA | CGACGCTC | GCTCTTCC | CAGGTGCTGCAGAAGGGATTCCATGAGGT |
| | | GCACC | TTCC | TTCCGATC | GATCTGGG | GCGCGAAGGCCCTACTTCCGCTTTCACCTTG |
| | | | | TGCAGAGA | GTCCCAGG | GAGACGGCGACTCTCTGCGTACTGATTGGA |
| | | | | TNNNNCAT | TGCTGAC | ACATCCGCGAAATGATACGCCTCTCTGCAAT |
| | | | | GGCGTATC | | G |
| | | | | A | | |
| HBBa | GCAACCTC | caccGCA | aaacTGGT | ACACTCTT | TGGAGTTC | AGGGTTGGCCAATCTACTCCCAGGAGCAGG |
| | AAACAGAC | ACCTCA | GTCTGTT | TCCCTACA | AGACGTGT | GAGGGCAGGAGCCAGGGCTGGGCATAAAA |
| | ACCA | AACAG | TGAGGT | CGACGCTC | GCTCTTCC | GTCAGGGCAGAGCCATCTATTGCTTACATTT |
| | | ACACC | TGC | TTCCGATC | GATCTGTC | GCTTCTGACACAACTGTGTTCACTAGCAAC |
| | | A | | TNNNNAG | TTCTCTGT | CTCAAACAGACACCATGGTGCATCTGACTC |
| | | | | GGTTGGCC | CTCCACAT | CTGAGGAGAAGTCTGCCGTTACTGCCCTGTG |
| | | | | AATCTACT | GCC | GGGCAAGGTGAACGTGGATGAAGTTGGTGG |
| | | | | CCC | | TGAGGCCCTGGGCAGGTTGGTATCAAGGTT |
| | | | | | | ACAAGACAGGTTTAAGGAGACCAATAGAAA |
| | | | | | | CTGGGCATGTGGAGACAGAGAAGAC |
| HEK4.1 | gCCTCCAG | caccgCC | aaacGGTG | ACACTCTT | TGGAGTTC | GAACCCAGGTAGCCAGAGACCCGCTGGTCT |
| | CCGCAGTG | TCCAGC | GCACTG | TCCCTACA | AGACGTGT | TCTTTCCCCTCCCCTGCCCTCCCCTCCCTTCA |
| | CCACC | CGCAG | CGGCTG | CGACGCTC | GCTCTTCC | AGATGGCTGACAAAGGCCGGGCTGGGTGGA |
| | | TGCCAC | GAGGc | TTCCGATC | GATCTTCC | AGGAAGGGAGGAAGGGCGAGGCAGAGGGT |
| | | C | | TNNNNGA | TTTCAACC | CCAAAGCAGGATGACAGGCAGGGGCACCGC |
| | | | | ACCCAGGT | CGAACGG | GGCGCCCCGGTGGCACTGCGGCTGGAGGT |
| | | | | AGCCAGA | AG | GGGGGTTAAAGCGGAGACTCTGGTGCTGTG |
| | | | | GAC | | TGACTACAGTGGGGGCCCTGCCCTCTCTGAG |
| | | | | | | CCCCCGCCTCCAGGCCTGTGTGTGTGTCTCC |
| | | | | | | GTTCGGGTTGAAAGGA |
| HEK21 | GCACTTGT | caccGCA | aaacGAAT | ACACTCTT | TGGAGTTC | TGAATGGATTCCTTGGAAACAATGATAACA |
| | TTGCAGCT | CTTGTT | AGCTGC | TCCCTACA | AGACGTGT | AGACCTGGCTGAGCTAACTGTGACAGCATG |
| | ATTC | TGCAG | AAACAA | CGACGCTC | GCTCTTCC | TGGTAATTTTCCAGCCCGCTGGCCCTGTAAA |
| | | CTATTC | GTGC | TTCCGATC | GATCTTGA | GGAAACTGGAACACAAAGCATAGACTGCGG |
| | | | | TNNNNCCA | ATGGATTC | GGCGGGCCAGCCTGAATAGCTGCAAACAA |
| | | | | GCCCCATC | CTTGGAAA | GTGCAGAATATCTGATGATGTCATACGCAC |
| | | | | TGTCAAAC | CAATGA | AGTTTGACAGATGGGGCTGG |
| | | | | T | | |
| HEK24 | GAGCTAAC | caccGAG | aaacCATG | ACACTCTT | TGGAGTTC | TGAATGGATTCCTTGGAAACAATGATAACA |
| | TGTGACAG | CTAACT | CTGTCA | TCCCTACA | AGACGTGT | AGACCTGGCTGAGCTAACTGTGACAGCAT |
| | CATG | GTGAC | CAGTTA | CGACGCTC | GCTCTTCC | GTGGTAATTTTCCAGCCCGCTGGCCCTGTAA |
| | | AGCAT | GCTC | TTCCGATC | GATCTTGA | AGGAAACTGGAACACAAAGCATAGACTGCG |
| | | G | | TNNNNCCA | ATGGATTC | GGGCGGGCCAGCCTGAATAGCTGCAAACAA |
| | | | | GCCCCATC | CTTGGAAA | GTGCAGAATATCTGATGATGTCATACGCAC |
| | | | | TGTCAAAC | CAATGA | AGTTTGACAGATGGGGCTGG |
| | | | | T | | |
| HEK34 | gTGCTTCTC | caccgTG | aaacAGGC | ACACTCTT | TGGAGTTC | ATGTGGGCTGCCTAGAAAGGCATGGATGAG |
| | CAGCCCTG | CTTCTC | CAGGGC | TCCCTACA | AGACGTGT | AGAAGCCTGGAGACAGGGATCCCAGGGAAA |
| | GCCT | CAGCC | TGGAGA | CGACGCTC | GCTCTTCC | CGCCCATGCAATTAGTCTATTTCTGCTGCAA |
| | | CTGGCC | AGCAc | TTCCGATC | GATCTCCC | GTAAGCATGCATTTGTAGGCTTGATGCTTTT |
| | | T | | TNNNNATG | AGCCAAAC | TTTCTGCTTCTCCAGCCCTGGCCTGGGTCA |
| | | | | TGGGCTGC | TTGTCAAC | ATCCTTGGGGCCCAGACTGAGCACGTGATG |
| | | | | CTAGAAAG | C | GCAGAGGAAAGGAAGCCCTGCTTCCTCCAG |
| | | | | G | | AGGGCGTCGCAGGACAGCTTTTCCTAGACA |
| | | | | | | GGGGCTAGTATGTGCAGCTCCTGCACCGGG |
| | | | | | | ATACTGGTTGACAAGTTTGGCTGGG |
| HEK35 | gCGTGCTC | caccgCG | aaacTGGG | ACACTCTT | TGGAGTTC | ATGTGGGCTGCCTAGAAAGGCATGGATGAG |
| | AGTCTGGG | TGCTCA | GCCCAG | TCCCTACA | AGACGTGT | AGAAGCCTGGAGACAGGGATCCCAGGGAAA |
| | CCCCA | GTCTGG | ACTGAG | CGACGCTC | GCTCTTCC | CGCCCATGCAATTAGTCTATTTCTGCTGCAA |
| | | GCCCC | CACGc | TTCCGATC | GATCTCCC | GTAAGCATGCATTTGTAGGCTTGATGCTTTT |
| | | A | | TNNNNATG | AGCCAAAC | TTTCTGCTTCTCCAGCCCTGGCCTGGGTCAA |
| | | | | TGGGCTGC | TTGTCAAC | TCCTTGGGGCCCAGACTGAGCACGTGATG |
| | | | | CTAGAAAG | C | GCAGAGGAAAGGAAGCCCTGCTTCCTCCAG |
| | | | | G | | AGGGCGTCGCAGGACAGCTTTTCCTAGACA |
| | | | | | | GGGGCTAGTATGTGCAGCTCCTGCACCGGG |
| | | | | | | ATACTGGTTGACAAGTTTGGCTGGG |
| HEK37 | gAGCACGT | caccgAG | aaacTTCC | ACACTCTT | TGGAGTTC | ATGTGGGCTGCCTAGAAAGGCATGGATGAG |
| | GATGGCAG | CACGT | TCTGCC | TCCCTACA | AGACGTGT | AGAAGCCTGGAGACAGGGATCCCAGGGAAA |
| | AGGAA | GATGG | ATCACG | CGACGCTC | GCTCTTCC | CGCCCATGCAATTAGTCTATTTCTGCTGCAA |
| | | CAGAG | TGCTc | TTCCGATC | GATCTCCC | GTAAGCATGCATTTGTAGGCTTGATGCTTTT |
| | | GAA | | TNNNNATG | AGCCAAAC | TTTCTGCTTCTCCAGCCCTGGCCTGGGTCAA |
| | | | | TGGGCTGC | TTGTCAAC | TCCTTGGGGCCCAGACTGAGCACGTGATGG |
| | | | | CTAGAAAG | C | CAGAGGAAAGGAAGCCCTGCTTCCTCCAGA |
| | | | | G | | GGGCGTCGCAGGACAGCTTTTCCTAGACAG |
| | | | | | | GGGCTAGTATGTGCAGCTCCTGCACCGGGA |
| | | | | | | TACTGGTTGACAAGTTTGGCTGGG |
| HEK310 | GCACATAC | caccGCA | aaacAGAC | ACACTCTT | TGGAGTTC | ATGTGGGCTGCCTAGAAAGGCATGGATGAG |
| | TAGCCCCT | CATACT | AGGGGC | TCCCTACA | AGACGTGT | AGAAGCCTGGAGACAGGGATCCCAGGGAAA |
| | GTCT | AGCCC | TAGTAT | CGACGCTC | GCTCTTCC | CGCCCATGCAATTAGTCTATTTCTGCTGCAA |
| | | CTGTCT | GTGC | TTCCGATC | GATCTCCC | GTAAGCATGCATTTGTAGGCTTGATGCTTTT |
| | | | | TNNNNATG | AGCCAAAC | TTTCTGCTTCTCCAGCCCTGGCCTGGGTCAA |
| | | | | TGGGCTGC | TTGTCAAC | TCCTTGGGGCCCAGACTGAGCACGTGATGG |
| | | | | CTAGAAAG | C | CAGAGGAAAGGAAGCCCTGCTTCCTCCAGA |
| | | | | G | | GGGCGTCGCAGGACAGCTTTTCCTAGACAG |
| | | | | | | GGGCTAGTATGTGCAGCTCCTGCACCGGG |
| | | | | | | ATACTGGTTGACAAGTTTGGCTGGG |
| HEK411 | gCCCTTCA | caccgCC | aaacTTGT | ACACTCTT | TGGAGTTC | GAACCCAGGTAGCCAGAGACCCGCTGGTCT |
| | AGATGGCT | CTTCAA | CAGCCA | TCCCTACA | AGACGTGT | TCTTTCCCCTCCCCTGCCCTCCCCTCCCTTC |
| | GACAA | GATGG | TCTTGA | CGACGCTC | GCTCTTCC | AAGATGGCTGACAAAGGCCGGGCTGGGTG |
| | | CTGAC | AGGGc | TTCCGATC | GATCTTCC | GAAGGAAGGGAGGAAGGGCGAGGCAGAGG |
| | | AA | | TNNNNGA | TTTCAACC | GTCCAAAGCAGGATGACAGGCAGGGGCACC |
| | | | | ACCCAGGT | CGAACGG | GCGGCGCCCCGGTGGCACTGCGGCTGGAGG |
| | | | | AGCCAGA | AG | TGGGGGTTAAAGCGGAGACTCTGGTGCTGT |
| | | | | GAC | | GTGACTACAGTGGGGGCCCTGCCCTCTCTGA |
| | | | | | | GCCCCCGCCTCCAGGCCTGTGTGTGTGTCTC |
| | | | | | | CGTTCGGGTTGAAAGGA |
| HEK43 | GCCATCTT | caccGCC | aaacTCCC | ACACTCTT | TGGAGTTC | GAACCCAGGTAGCCAGAGACCCGCTGGTCT |
| | GAAGGGAG | ATCTTG | CTCCCTT | TCCCTACA | AGACGTGT | TCTTTCCCCTCCCCTGCCCTCCCCTCCCTTC |
| | GGGA | AAGGG | CAAGAT | CGACGCTC | GCTCTTCC | AAGATGGCTGACAAAGGCCGGGCTGGGTG |
| | | AGGGG | GGC | TTCCGATC | GATCTTCC | GAAGGAAGGGAGGAAGGGCGAGGCAGAGG |
| | | A | | TNNNNGA | TTTCAACC | GTCCAAAGCAGGATGACAGGCAGGGGCACC |
| | | | | ACCCAGGT | CGAACGG | GCGGCGCCCCGGTGGCACTGCGGCTGGAGG |
| | | | | AGCCAGA | AG | TGGGGGTTAAAGCGGAGACTCTGGTGCTGT |
| | | | | GAC | | GTGACTACAGTGGGGGCCCTGCCCTCTCTGA |
| | | | | | | GCCCCCGCCTCCAGGCCTGTGTGTGTGTCTC |
| | | | | | | CGTTCGGGTTGAAAGGA |
| KCNQ2 | gCGGCTCT | caccgCG | aaacCAAA | ACACTCTT | TGGAGTTC | CTCTGTCCAGCACCATGAGCACCGGCAGCA |
| R541T | GATGCTGA | GCTCTG | GTCAGC | TCCCTACA | AGACGTGT | GGCAGGACCACCGAGCGGGAGGCCCCTCCT |
| | CTTTG | ATGCTG | ATCAGA | CGACGCTC | GCTCTTCC | CACTCCCCCAGGCTCCCGGCTGGGCAGGGG |
| | | ACTTTG | GCCGc | TTCCGATC | GATCTNNN | CCTCACCACACGGCTCTGATGCTGACTTT |
| | | | | TNNNNCTC | NGTTTGTG | GAGGCCCGGGGTCAGGTCCTCGGTCACAAA |
| | | | | TGTCCAGC | ACCGAGG | C |
| | | | | ACCATGAG | ACCTGA | |
| | | | | CA | | |
| CTNNB1 | GCTAGGAT | caccGCT | aaacTGAC | ACACTCTT | TGGAGTTC | GGTCCATACCCAAGGCATCCTGGCCATATCC |
| c.2138 | CTAGAAGA | AGGAT | TCTTCTA | TCCCTACA | AGACGTGT | ACCAGAGTGAAAAGAACGATAGCTAGGAT |
| −1 | GTCA | CTAGA | GATCCT | CGACGCTC | GCTCTTCC | CTAGAAGAGTCAGGGTGTCAACAAAATAG |
| G > C | | AGAGT | AGC | TTCCGATC | GATCTNNN | GCAAGAAGGAAGGCAAAAGAGAGAGGAGA |
| | | CA | | TNNNNGGT | NTGGATGC | GAAGCAGACATAGACGTTAACACTGAGGTT |
| | | | | CCATACCC | CCTAACCT | AGGGCATCCA |
| | | | | AAGGCATC | CAGTG | |
| | | | | C | | |
| DIS3L2 | GTGCCATC | caccGTG | aaacTCCC | ACACTCTT | TGGAGTTC | GTGTGTACAGGGGCACATTGAGCGCGTAGT |
| c.2011 | TGCGGGAC | CCATCT | GTCCCG | TCCCTACA | AGACGTGT | GCCGGAACTGCGCTGGGTCCTGCAGCAGCC |
| −1 | GGGA | GCGGG | CAGATG | CGACGCTC | GCTCTTCC | CCGAGCAGAAGTACAGTGCCATCTGCGGG |
| G > C | | ACGGG | GCAC | TTCCGATC | GATCTNNN | ACGGGATGGGTCAGAGCCTGACAAGCCCAG |
| | | A | | TNNNNGTG | NTTAGGTC | AGCTGCCCAGCCAGGCCTGGAAGGCTGGCA |
| | | | | TGTACAGG | TGTCCACA | CCACCCACAGCCTCACCGTCGGCAGCGATG |
| | | | | GGCACATT | CATCGC | TGTGGACAGACCTAA |
| | | | | G | | |
| KCNQ2 | GTCCACTC | caccGTC | aaacCTGT | ACACTCTT | TGGAGTTC | GTCCTCGGGCAGCTCCGCCTCGGCCGGGCCC |
| c.1764 | TACCGGGA | CACTCT | TCCCGG | TCCCTACA | AGACGTGT | TTGGTGCGGTCCTTGTCCGTGATCGCTGGGC |
| −1 | ACAG | ACCGG | TAGAGT | CGACGCTC | GCTCTTCC | CCCGCCCCACGATCTGGTCCACTCTACCGG |
| G > C | | GAACA | GGAC | TTCCGATC | GATCTNNN | GAACAGAGACCCCAAAGCATGAGTTCGGGT |
| (NG) | | G | | TNNNNGTC | NGCCTGGT | GGGTGCAGCAGGGCCCCTGCCCTCTCCTCCT |
| | | | | CTCGGGCA | CCAGGAG | GGACCAGGC |
| | | | | GCTCC | GAG | |

TABLE 7
Off-Targets

| | Forward | Reverse | | | |
|---|---|---|---|---|---|
| | homology to | homology to | | | Genomic amplicon |
| | genome | genome | | | (italics designates the |
| | (5′-3′) | (5′-3′) | Forward primer | Reverse primer | off-target sequence homologous |
| | (SEQ ID NOs: | (SEQ ID NOs: | (SEQ ID NOs: | (SEQ ID NOs: | to the protospacer) |
| Site | 623-638) | 639-652) | 653-666) | 667-680) | (SEQ ID NOs: 681-694) |
| HEK2 | GTGTGGAGA | ACGGTAGGAT | ACACTCTTTC | TGGAGTTCAG | GTGTGGAGAGTGAGTAAGCCAGAACAC |
| OT1 | GTGAGTAAG | GATTTCAGGC | CCTACACGAC | ACGTGTGCTC | AATGCATAGATTGCCGGTAAATAGGTTTA |
| | CCA | A | GCTCTTCCGA | TTCCGATCTA | GATTCATCCATTTTTAAAAAATGGTGTG |
| | | | TCTNNNNGTG | CGGTAGGATG | GGAGCATTAAATATGTATATAGTAGAT |
| | | | TGGAGAGTGA | ATTTCAGGCA | ATGGAAAAATGATTCTCATAATAACTG |
| | | | GTAAGCCA | | ACATTTCTGTTTCACAAGAAAATTATTT |
| | | | | | TACATTATATGTATATTTTACATAAATT |
| | | | | | ATACATAGTCATTTAAAAAGCTCAAAT |
| | | | | | AGTGCAAAAACAATATGGAGAATTGCC |
| | | | | | TGAAATCATCCTACCGT |
| HEK2 | CACAAAGCA | TTTTTGGTAC | ACACTCTTTC | TGGAGTTCAG | CACAAAGCAGTGTAGCTCAGGGAAGGA |
| OT2 | GTGTAGCTC | TCGAGTGTTA | CCTACACGAC | ACGTGTGCTC | GCAGTGAGTTTGGGCACTTGTGACAGA |
| | AGG | TTCAG | GCTCTTCCGA | TTCCGATCTT | ATAGTGGGACTATGCCAGAGATACACA |
| | | | TCTNNNNCAC | TTTTGGTACT | GGAGGAGGTGGTACCTTCTAGCTCCCC |
| | | | AAAGCAGTGT | CGAGTGTTAT | CTCAAAACATAAAGCATAGACTGCAAAGT |
| | | | AGCTCAGG | TCAG | ACTCCCAAGCAGGCTGAATAACACTCG |
| | | | | | AGTACCAAAAA |
| HEK3 | TCCCCTGTTG | CACTGTACTT | ACACTCTTTC | TGGAGTTCAG | TCCCCTGTTGACCTGGAGAAGCATGAA |
| OT1 | ACCTGGAGA | GCCCTGACCA | CCTACACGAC | ACGTGTGCTC | CCAGTCAAAAAGTTTAAAGACAAGAGC |
| | A | | GCTCTTCCGA | TTCCGATCTC | ATTAACTGCACCAGTGGGCAGCTCAGC |
| | | | TCTNNNNTCC | ACTGTACTTG | TCAGACACCAGTAGCGTGGGCACCCAG |
| | | | CCTGTTGACC | CCCTGACCA | ACTGAGCACGTGCTGGAGCCCAAGAAAT |
| | | | TGGAGAA | | GCAGAGACCTGTGCACCTCTGGTCAGG |
| | | | | | GCAAGTACAGTG |
| HEK3 | TTGGTGTTG | CTGAGATGTG | ACACTCTTTC | TGGAGTTCAG | TTGGTGTTGACAGGGAGCAACTTCACA |
| OT2 | ACAGGGAGC | GGCAGAAGG | CCTACACGAC | ACGTGTGCTC | GTCCCAGGCATCAGGACACAGACTGGGC |
| | AA | G | GCTCTTCCGA | TTCCGATCTC | ACGTGAGGGAAGCCCAAGGGAGAGGAC |
| | | | TCTNNNNTTG | TGAGATGTGG | TGGTGTAATCGAGGCTGACTCCACTTTT |
| | | | GTGTTGACAG | GCAGAAGGG | AATGTTTGACTGATGATAGGTTTCAAGT |
| | | | GGAGCAA | | CTCACTAAGTCTCCTTCCCCTTCTGCCC |
| | | | | | ACATCTCAG |
| HEK3 | TGAGAGGGA | GTCCAAAGGC | ACACTCTTTC | TGGAGTTCAG | TGAGAGGGAACAGAAGGGCTAAGACTA |
| OT3 | ACAGAAGGG | CCAAGAACCT | CCTACACGAC | ACGTGTGCTC | AAAGGAACAGAGGAGTTCATAGTGAGC |
| | CT | | GCTCTTCCGA | TTCCGATCTG | GGTAAAGAGCTCAGACTGAGCAAGTGAG |
| | | | TCTNNNNTGA | TCCAAAGGCC | GGGCTCAGCCTCCCATGGAGGACAGGG |
| | | | GAGGGAACA | CAAGAACCT | GGCTGGGGCCCCTGGCTGATGTCTGGA |
| | | | GAAGGGCT | | CTGAAGCCCCCACGCCCAGAGGTTCTT |
| | | | | | GGGCCTTTGGAC |
| HEK3 | TCCTAGCAC | GCTCATCTTA | ACACTCTTTC | TGGAGTTCAG | TCCTAGCACTTTGGAAGGTCGAAGCGG |
| OT4 | TTTGGAAGG | ATCTGCTCAG | CCTACACGAC | ACGTGTGCTC | CAGGATGGCTTCAACCCAGGAGTTCGA |
| | TCG | CC | GCTCTTCCGA | TTCCGATCTG | GACCAGACTGAGCAAGAGAGGGAGAGTG |
| | | | TCTNNNNTCC | CTCATCTTAA | TCTGTATTAACAACAAACAAACAAACA |
| | | | TAGCACTTTG | TCTGCTCAGC | AAAAACTAAACTAAAAGAAACTGTGGT |
| | | | GAAGGTCG | C | GTATAATATAAAATTCTGGCTGAGCAG |
| | | | | | ATTAAGATGAGC |
| HEK4 | GGCATGGCT | TGTCCCCTTG | ACACTCTTTC | TGGAGTTCAG | GGCATGGCTTCTGAGACTCATAGCTGG |
| OT1 | TCTGAGACT | CACTCCCTGT | CCTACACGAC | ACGTGTGCTC | GGCTGAAGATCCCTAGGGGGGCTCTGC |
| | CA | CTTT | GCTCTTCCGA | TTCCGATCTT | TGGGCTCACTGCTCTCCAGAGTGGTCCA |
| | | | TCTNNNNGGC | GTCCCCTTGC | GCCCGGCTGCAGGGTGCTGCTTCCAGCT |
| | | | ATGGCTTCTG | ACTCCCTGTC | TGGTGCACTGCGGCCGGAGGAGGTGGA |
| | | | AGACTCA | TTT | GGATGGAAAGTAAGATTCAAAGACAGG |
| | | | | | GAGTGCAAGGG |
| HEK4 | GAAGAGGCT | TTTGGCAATG | ACACTCTTTC | TGGAGTTCAG | GAAGAGGCTGCCCATGAGAGCAAGGGA |
| OT2 | GCCCATGAG | GAGGCATTGG | CCTACACGAC | ACGTGTGCTC | GCCGAAGCAAGTGCTCCCCAATCCTGA |
| | AG | | GCTCTTCCGA | TTCCGATCTT | AACCTGCCTGGCTGGGGCCCCTGTCACT |
| | | | TCTNNNNGAA | TTGGCAATGG | AACAGCAACCCCACCCCCTCTAGCCGCA |
| | | | GAGGCTGCCC | AGGCATTGG | GAGCCCTGCGCACGTGCATGTGCCCTGA |
| | | | ATGAGAG | | AGACAGGCTTCCCCTGCCCAATGCCTCC |
| | | | | | ATTGCCAAA |
| HEK4 | GGTCTGAGG | CTGTGGCCTC | ACACTCTTTC | TGGAGTTCAG | GGTCTGAGGCTCGAATCCTGGCAGCAG |
| OT3 | CTCGAATCC | CATATCCCTG | CCTACACGAC | ACGTGTGCTC | GTCCTTCATGGCAAGGCGGGAAAAGAG |
| | TG | | GCTCTTCCGA | TTCCGATCTC | AAAAGCCAACGGGTTCTCATGCTGGGA |
| | | | TCTNNNNGGT | TGTGGCCTCC | AAAGATGCCGGGCACGACGGCTGGAGG |
| | | | CTGAGGCTCG | ATATCCCTG | TGGGGGGTTGGGAGTGGGTGGGATGCT |
| | | | AATCCTG | | TGCGTGCCCTGCATGAGGTGCAGGGAT |
| | | | | | ATGGAGGCCACAG |
| HEK4 | TTTCCACCA | CCTCGGTTCC | ACACTCTTTC | TGGAGTTCAG | TTTCCACCAGAACTCAGCCCAGGCTGCT |
| OT4 | GAACTCAGC | TCCACAACAC | CCTACACGAC | ACGTGTGCTC | GTGGGATGGAATCACCTGCACCCGGAT |
| | CC | | GCTCTTCCGA | TTCCGATCTC | GTTCTTTCTGGGCTGGTACATACAGGCA |
| | | | TCTNNNNTTT | CTCGGTTCCT | AGGCATCACGGCTGGAGGTGGAGGGGG |
| | | | CCACCAGAAC | CCACAACAC | CCTAACCCGGGGTTGCCCAGGAAGGGG |
| | | | TCAGCCC | | TTTGCACATGGATTCGGTGTGTTGTGGA |
| | | | | | GGAACCGAGG |
| FANCF | GCGGGCAGT | CCCTGGGTTT | ACACTCTTTC | TGGAGTTCAG | GCGGGCAGTGGCGTCTTAGTCGCCTTA |
| OT1 | GGCGTCTTA | GGTTGGCTGC | CCTACACGAC | ACGTGTGCTC | GCACTGGGTGCTTAATCCGGCTCCATCT |
| | GTCG | TC | GCTCTTCCGA | TTCCGATCTC | TTTCTCCACGGAGGGGGCCTGGTGCTGC |
| | | | TCTNNNNGCG | CCTGGGTTTG | AGACGGGGTTCCCGGGGTCAGGACGAT |
| | | | GGCAGTGGCG | GTTGGCTGCT | CCAGGTGACTTGAGAGAAAATAAGGGG |
| | | | TCTTAGTCG | C | AGTTGTATTGACACCAACTGTTTTATTT |
| | | | | | ATTGTGATCTTCAGGTTAGTAAACAACT |
| | | | | | CCAGTGGCATCAATCTGTGTATCTGTTA |
| | | | | | AGTCTTAATGAGCAGCCAACCAAACCC |
| | | | | | AGGG |
| FANCF | CTCCTTGCCG | CACTGGGGAA | ACACTCTTTC | TGGAGTTCAG | CTCCTTGCCGCCCAGCCGGTCCAGGCCT |
| OT2 | CCCAGCCGG | GAGGCGAGG | CCTACACGAC | ACGTGTGCTC | CTGGCGAACATGGCGCTTGTCCCCTGCC |
| | TC | ACAC | GCTCTTCCGA | TTCCGATCTC | AGGTGCTGCGGATGGCAATCCTGCTGTC |
| | | | TCTNNNNCTC | ACTGGGGAA | TTACTGCTCTATCCTGTGTAACTACAAG |
| | | | CTTGCCGCCC | GAGGCGAGG | GCCATCGAAATGCCCTCACACCAGACC |
| | | | AGCCGGTC | ACAC | TACGGAGGGAGCTGGAAATTCCTGACG |
| | | | | | TTCATTGATCTGGTAAGGCCGTCCCCTC |
| | | | | | CCCCTGCTCGCCCCGCACCCCGTGCCTG |
| | | | | | TGTGTGCGTGTGTGTGTGTGTGTGTGTG |
| | | | | | TGTGTGTGTGGATGCGCGAGCACCTGC |
| | | | | | GCACGTGCGCGCCTCCAGCATCCACCC |
| | | | | | GTGTCCTCGCCTCTTCCCCAGTG |
| FANCF | CCAGTGTTTC | GAATGGATCC | ACACTCTTTC | TGGAGTTCAG | CCAGTGTTTCCCATCCCCAACACAGTGA |
| OT3 | CCATCCCCA | CCCCCTAGAG | CCTACACGAC | ACGTGTGCTC | CAGAAGGCAGCCAAGGAATCCTCATTC |
| | ACAC | CTC | GCTCTTCCGA | TTCCGATCTG | CTGTCCTGGAACTACAGGAGTCCCTCCT |
| | | | TCTNNNNCCA | AATGGATCCC | ACAGCACCAGGTGTATTCATCTTCTGTT |
| | | | GTGTTTCCCA | CCCCTAGAGC | GTTGCTATAACAAAATTACCACAAACTT |
| | | | TCCCCAACAC | TC | AGTGGCTTAAGTAACTACACATTTATTA |
| | | | | | TTTTCCAGTTGTGGAGGTCAGAGGTCTC |
| | | | | | AAACTGGTCTCACTGGGAAAAACTCAA |
| | | | | | GGTCTTCAGGGCTGTATTCCCTTTGGAG |
| | | | | | CTCTAGGGGGGGATCCATTC |
| FANCF | CAGGCCCAC | CCACACGGAA | ACACTCTTTC | TGGAGTTCAG | CAGGCCCACAGGTCCTTCTGGAAGGAC |
| OT4 | AGGTCCTTCT | GGCTGACCAC | CCTACACGAC | ACGTGTGCTC | TCAGGCAGGAGTTAGGAGGCTCCCGGG |
| | GGA | G | GCTCTTCCGA | TTCCGATCTC | GTCAGGCTTCTGGGTCTAGATTTCCAGA |
| | | | TCTNNNNCAG | CACACGGAA | GGCCCCTCTGCAGCACCAGGCATTCGCC |
| | | | GCCCACAGGT | GGCTGACCAC | TCTAGGAGTCATCGCTCTTCAGCGGATC |
| | | | CCTTCTGGA | G | CTGCAGCCCTTGGCGATGCTCAGAGTG |
| | | | | | AACGCGTTACCCCGCCAGCCCCCCTCTG |
| | | | | | CCGGCTCCTGCCGGTTTGTGATTTCTGT |
| | | | | | GTCTTCGTCTGTGGCCTGTGGATGTGGC |
| | | | | | CTTACACCTCGTGGTCAGCCTTCCGTGT |
| | | | | | GG |

TABLE 8
Sequences of the Domains of Exemplary CGBE Fusion Proteins

| | | |
|---|---|---|
| | | SEQ |
| | | ID |
| Name | Sequence | NO: |

Deaminase domains

| | | |
|---|---|---|
| rAPOBEC | MSSETGPVAVDPTLRRRIEPHEFEVFFDPRELRKETCLLYEINWGGRHSIWRHTS | 695 |
| | QNTNKHVEVNFIEKFTTERYFCPNTRCSITWFLSWSPCGECSRAITEFLSRYPHV | |
| | TLFIYIARLYHHADPRNRQGLRDLISSGVTIQIMTEQESGYCWRNFVNYSPSNEA | |
| | HWPRYPHLWVRLYVLELYCIILGLPPCLNILRRKQPQLTFFTIALQSCHYQRLPP | |
| | HILWATGLK | |
| EE (rAPOBEC1 | MSSETGPVAVDPTLRRRIEPHEFEVFFDPRELRKETCLLYEINWGGRHSIWRHTS | 696 |
| R126E, R132E) | QNTNKHVEVNFIEKFTTERYFCPNTRCSITWFLSWSPCGECSRAITEFLSRYPHV | |
| | TLFIYIARLYHHADPENRQGLEDLISSGVTIQIMTEQESGYCWRNFVNYSPSNEA | |
| | HWPRYPHLWVRLYVLELYCIILGLPPCLNILRRKQPQLTFFTIALQSCHYQRLPP | |
| | HILWATGLK | |
| YE1 (rAPOBEC1 | MSSETGPVAVDPTLRRRIEPHEFEVFFDPRELRKETCLLYEINWGGRHSIWRHTS | 697 |
| W90Y, R126E) | QNTNKHVEVNFIEKFTTERYFCPNTRCSITWFLSYSPCGECSRAITEFLSRYPHVT | |
| | LFIYIARLYHHADPENRQGLRDLISSGVTIQIMTEQESGYCWRNFVNYSPSNEAH | |
| | WPRYPHLWVRLYVLELYCIILGLPPCLNILRRKQPQLTFFTIALQSCHYQRLPPHI | |
| | LWATGLK | |
| YE2 (rAPOBEC1 | MSSETGPVAVDPTLRRRIEPHEFEVFFDPRELRKETCLLYEINWGGRHSIWRHTS | 698 |
| W90Y, R132E) | QNTNKHVEVNFIEKFTTERYFCPNTRCSITWFLSYSPCGECSRAITEFLSRYPHVT | |
| | LFIYIARLYHHADPRNRQGLEDLISSGVTIQIMTEQESGYCWRNFVNYSPSNEAH | |
| | WPRYPHLWVRLYVLELYCIILGLPPCLNILRRKQPQLTFFTIALQSCHYQRLPPHI | |
| | LWATGLK | |
| YEE (rAPOBEC1 | MSSETGPVAVDPTLRRRIEPHEFEVFFDPRELRKETCLLYEINWGGRHSIWRHTS | 699 |
| W90Y, R126E, R132E) | QNTNKHVEVNFIEKFTTERYFCPNTRCSITWFLSYSPCGECSRAITEFLSRYPHVT | |
| | LFIYIARLYHHADPENRQGLEDLISSGVTIQIMTEQESGYCWRNFVNYSPSNEAH | |
| | WPRYPHLWVRLYVLELYCIILGLPPCLNILRRKQPQLTFFTIALQSCHYQRLPPHI | |
| | LWATGLK | |
| Anc68919 | MSSETGPVAVDPTLRRRIEPHEFEVFFDPRELRKETCLLYEIKWGTSHKIWRHSS | 700 |
| | KNTTKHVEVNFIEKFTSERHFCPSTSCSITWFLSWSPCGECSKAITEFLSQHPNVT | |
| | LVIYVARLYHHMDQQNRQGLRDLVNSGVTIQIMTAPEYDYCWRNFVNYPPGK | |
| | EAHWPRYPPLWMKLYALELHAGILGLPPCLNILRRKQPQLTFFTIALQSCHYQR | |
| | LPPHI | |
| eA3A 30 | MEASPASGPRHLMDPHIFTSNFNNGIGRHKTYLCYEVERLDNGTSVKMDQHRG | 701 |
| | FLHGQAKNLLCGFYGRHAELRFLDLVPSLQLDPAQIYRVTWFISWSPCFSWGCA | |
| | GEVRAFLQENTHVRLRIFAARIYDYDPLYKEALQMLRDAGAQVSIMTYDEFKH | |
| | CWDTFVDHQGCPFQPWDGLDEHSQALSGRLRAILQNQGN | |
| eA3A* (T31A) | MEASPASGPRHLMDPHIFTSNFNNGIGRHKAYLCYEVERLDNGTSVKMDQHRG | 702 |
| | FLHGQAKNLLCGFYGRHAELRFLDLVPSLQLDPAQIYRVTWFISWSPCFSWGCA | |
| | GEVRAFLQENTHVRLRIFAARIYDYDPLYKEALQMLRDAGAQVSIMTYDEFKH | |
| | CWDTFVDHQGCPFQPWDGLDEHSQALSGRLRAILQNQGN | |

Glycosylase fusion domains

| | | |
|---|---|---|
| UdgX | MAGAQDFVPHTADLAELAAAAGECRGCGLYRDATQAVFGAGGRSARIMMIGE | 703 |
| | QPGDKEDLAGLPFVGPAGRLLDRALEAADIDRDALYVTNAVKHFKFTRAAGG | |
| | KRRIHKTPSRTEVVACRPWLIAEMTSVEPDVVVLLGATAAKALLGNDFRVTQH | |
| | RGEVLHVDDVPGDPALVATVHPSSLLRGPKEERESAFAGLVDDLRVAADVRP | |
| UNG2 | MIGQKTLYSFFSPSPARKRHAPSPEPAVQGTGVAGVPEESGDAAAIPAKKAPAG | 704 |
| | QEEPGTPPSSPLSAEQLDRIQRNKAAALLRLAARNVPVGFGESWKKHLSGEFGK | |
| | PYFIKLMGFVAEERKHYTVYPPPHQVFTWTQMCDIKDVKVVILGQDPYHGPNQ | |
| | AHGLCFSVQRPVPPPPSLENIYKELSTDIEDFVHPGHGDLSGWAKQGVLLLNAV | |
| | LTVRAHQANSHKERGWEQFTDAVVSWLNQNSNGLVFLLWGSYAQKKGSAIDR | |
| | KRHHVLQTAHPSPLSVYRGFFGCRHFSKTNELLQKSGKKPIDWKEL | |
| SMUG1 | MPQAFLLGSIHEPAGALMEPQPCPGSLAESFLEEELRLNAELSQLQFSEPVGIIYN | 705 |
| | PVEYAWEPHRNYVTRYCQGPKEVLFLGMNPGPFGMAQTGVPFGEVSMVRDW | |
| | LGIVGPVLTPPQEHPKRPVLGLECPQSEVSGARFWGFFRNLCGQPEVFFHHCFV | |
| | HNLCPLLFLAPSGRNLTPAELPAKQREQLLGICDAALCRQVQLLGVRLVVGVGR | |
| | LAEQRARRALAGLMPEVQVEGLLHPSPRNPQANKGWEAVAKERLNELGLLPLL | |
| | LK | |
| MBD4 | MGTTGLESLSLGDRGAAPTVTSSERLVPDPPNDLRKEDVAMELERVGEDEEQM | 706 |
| | MIKRSSECNPLLQEPIASAQFGATAGTECRKSVPCGWERVVKQRLFGKTAGRFD | |
| | VYFISPQGLKFRSKSSLANYLHKNGETSLKPEDFDFTVLSKRGIKSRYKDCSMA | |
| | ALTSHLQNQSNNSNWNLRTRSKCKKDVFMPPSSSSELQESRGLSNFTSTHLLLK | |
| | EDEGVDDVNFRKVRKPKGKVTILKGIPIKKTKKGCRKSCSGFVQSDSKRESVCN | |
| | KADAESEPVAQKSQLDRTVCISDAGACGETLSVTSEENSLVKKKERSLSSGSNF | |
| | CSEQKTSGIINKFCSAKDSEHNEKYEDTFLESEEIGTKVEVVERKEHLHTDILKR | |
| | GSEMDNNCSPTRKDFTGEKIFQEDTIPRTQIERRKTSLYFSSKYNKEALSPPRRK | |
| | AFKKWTPPRSPFNLVQETLFHDPWKLLIATIFLNRTSGKMAIPVLWKFLEKYPSA | |
| | EVARTADWRDVSELLKPLGLYDLRAKTIVKFSDEYLTKQWKYPIELHGIGKYG | |
| | NDSYRIFCVNEWKQVHPEDHKLNKYHDWLWENHEKLSL | |
| TDG | MEAENAGSYSLQQAQAFYTFPFQQLMAEAPNMAVVNEQQMPEEVPAPAPAQE | 707 |
| | PVQEAPKGRKRKPRTTEPKQPVEPKKPVESKKSGKSAKSKEKQEKITDTFKVKR | |
| | KVDRFNGVSEAELLTKTLPDILTFNLDIVIIGINPGLMAAYKGHHYPGPGNHFW | |
| | KCLFMSGLSEVQLNHMDDHTLPGKYGIGFTNMVERTTPGSKDLSSKEFREGGRI | |
| | LVQKLQKYQPRIAVFNGKCIYEIFSKEVFGVKVKNLEFGLQPHKIPDTETLCYV | |
| | MPSSSARCAQFPRAQDKVHYYIKLKDLRDQLKGIERNMDVQEVQYTFDLQLAQ | |
| | EDAKKMAVKEEKYDPGYEAAYGGAYGENPCSSEPCGFSSNGLIESVELRGESA | |
| | FSGIPNGQWMTQSFTDQIPSFSNHCGTQEQEEESHA | |

CRISPRi screen hit fusion domains

| | | |
|---|---|---|
| DDX1 | MAAFSEMGVMPEIAQAVEEMDWLLPTDIQAESIPLILGGGDVLMAAETGSGKT | 708 |
| | GAFSIPVIQIVYETLKDQQEGKKGKTTIKTGASVLNKWQMNPYDRGSAFAIGSD | |
| | GLCCQSREVKEWHGCRATKGLMKGKHYYEVSCHDQGLCRVGWSTMQASLDL | |
| | GTDKFGFGFGGTGKKSHNKQFDNYGEEFTMHDTIGCYLDIDKGHVKFSKNGKD | |
| | LGLAFEIPPHMKNQALFPACVLKNAELKFNFGEEEFKFPPKDGFVALSKAPDGYI | |
| | VKSQHSGNAQVTQTKFLPNAPKALIVEPSRELAEQTLNNIKQFKKYIDNPKLREL | |
| | LIIGGVAARDQLSVLENGVDIVVGTPGRLDDLVSTGKLNLSQVRFLVLDEADGL | |
| | LSQGYSDFINRMHNQIPQVTSDGKRLQVIVCSATLHSFDVKKLSEKIMHFPTWV | |
| | DLKGEDSVPDTVHHVVVPVNPKTDRLWERLGKSHIRTDDVHAKDNTRPGANS | |
| | PEMWSEAIKILKGEYAVRAIKEHKMDQAIIFCRTKIDCDNLEQYFIQQGGGPDK | |
| | KGHQFSCVCLHGDRKPHERKQNLERFKKGDVRFLICTDVAARGIDIHGVPYVIN | |
| | VTLPDEKQNYVHRIGRVGRAERMGLAISLVATEKEKVWYHVCSSRGKGCYNT | |
| | RLKEDGGCTIWYNEMQLLSEIEEHLNCTISQVEPDIKVPVDEFDGKVTYGQKRA | |
| | AGGGSYKGHVDILAPTVQELAALEKEAQTSFLHLGYLPNQLFRTF | |
| EXO1 | MGIQGLLQFIKEASEPIHVRKYKGQVVAVDTYCWLHKGAIACAEKLAKGEPTD | 709 |
| | RYVGFCMKFVNMLLSHGIKPILVFDGCTLPSKKEVERSRRERRQANLLKGKQLL | |
| | REGKVSEARECFTRSINITHAMAHKVIKAARSQGVDCLVAPYEADAQLAYLNK | |
| | AGIVQAIITEDSDLLAFGCKKVILKMDQFGNGLEIDQARLGMCRQLGDVFTEEK | |
| | FRYMCILSGCDYLSSLRGIGLAKACKVLRLANNPDIVKVIKKIGHYLKMNITVPE | |
| | DYINGFIRANNTFLYQLVFDPIKRKLIPLNAYEDDVDPETLSYAGQYVDDSIALQ | |
| | IALGNKDINTFEQIDDYNPDTAMPAHSRSHSWDDKTCQKSANVSSIWHRNYSPR | |
| | PESGTVSDAPQLKENPSTVGVERVISTKGLNLPRKSSIVKRPRSAELSEDDLLSQ | |
| | YSLSFTKKTKKNSSEGNKSLSFSEVFVPDLVNGPTNKKSVSTPPRTRNKFATFLQ | |
| | RKNEESGAVVVPGTRSRFFCSSDSTDCVSNKVSIQPLDETAVTDKENNLHESEY | |
| | GDQEGKRLVDTDVARNSSDDIPNNHIPGDHIPDKATVFTDEESYSFESSKFTRTIS | |
| | PPTLGTLRSCFSWSGGLGDFSRTPSPSPSTALQQFRRKSDSPTSLPENNMSDVSQ | |
| | LKSEESSDDESHPLREEACSSQSQESGEFSLQSSNASKLSQCSSKDSDSEESDCNI | |
| | KLLDSQSDQTSKLRLSHFSKKDTPLRNKVPGLYKSSSADSLSTTKIKPLGPARAS | |
| | GLSKKPASIQKRKHHNAENKPGLQIKLNELWKNFGFKKDSEKLPPCKKPLSPVR | |
| | DNIQLTPEAEEDIFNKPECGRVQRAIFQ | |
| PCNA | MFEARLVQGSILKKVLEALKDLINEACWDISSSGVNLQSMDSSHVSLVQLTLRS | 710 |
| | EGFDTYRCDRNLAMGVNLTSMSKILKCAGNEDIITLRAEDNADTLALVFEAPNQ | |
| | EKVSDYEMKLMDLDVEQLGIPEQEYSCVVKMPSGEFARICRDLSHIGDAVVISC | |
| | AKDGVKFSASGELGNGNIKLSQTSNVDKEEEAVTIEMNEPVQLTFALRYLNFFT | |
| | KATPLSSTVTLSMSADVPLVVEYKIADMGHLKYYLAPKIEDEEGS | |
| POLD1 | MDGKRRPGPGPGVPPKRARGGLWDDDDAPRPSQFEEDLALMEEMEAEHRLQE | 711 |
| | QEEEELQSVLEGVADGQVPPSAIDPRWLRPTPPALDPQTEPLIFQQLEIDHYVGP | |
| | AQPVPGGPPPSRGSVPVLRAFGVTDEGFSVCCHIHGFAPYFYTPAPPGFGPEHM | |
| | GDLQRELNLAISRDSRGGRELTGPAVLAVELCSRESMFGYHGHGPSPFLRITVAL | |
| | PRLVAPARRLLEQGIRVAGLGTPSFAPYEANVDFEIRFMVDTDIVGCNWLELPA | |
| | GKYALRLKEKATQCQLEADVLWSDVVSHPPEGPWQRIAPLRVLSFDIECAGRK | |
| | GIFPEPERDPVIQICSLGLRWGEPEPFLRLALTLRPCAPILGAKVQSYEKEEDLLQ | |
| | AWSTFIRIMDPDVITGYNIQNFDLPYLISRAQTLKVQTFPFLGRVAGLCSNIRDSS | |
| | FQSKQTGRRDTKVVSMVGRVQMDMLQVLLREYKLRSYTLNAVSFHFLGEQKE | |
| | DVQHSIITDLQNGNDQTRRRLAVYCLKDAYLPLRLLERLMVLVNAVEMARVT | |
| | GVPLSYLLSRGQQVKVVSQLLRQAMHEGLLMPVVKSEGGEDYTGATVIEPLKG | |
| | YYDVPIATLDFSSLYPSIMMAHNLCYTTLLRPGTAQKLGLTEDQFIRTPTGDEFV | |
| | KTSVRKGLLPQILENLLSARKRAKAELAKETDPLRRQVLDGRQLALKVSANSV | |
| | YGFTGAQVGKLPCLEISQSVTGFGRQMIEKTKQLVESKYTVENGYSTSAKVVY | |
| | GDTDSVMCRFGVSSVAEAMALGREAADWVSGHFPSPIRLEFEKVYFPYLLISKK | |
| | RYAGLLFSSRPDAHDRMDCKGLEAVRRDNCPLVANLVTASLRRLLIDRDPEGA | |
| | VAHAQDVISDLLCNRIDISQLVITKELTRAASDYAGKQAHVELAERMRKRDPGS | |
| | APSLGDRVPYVIISAAKGVAAYMKSEDPLFVLEHSLPIDTQYYLEQQLAKPLLRI | |
| | FEPILGEGRAEAVLLRGDHTRCKTVLTGKVGGLLAFAKRRNCCIGCRTVLSHQG | |
| | AVCEFCQPRESELYQKEVSHLNALEERFSRLWTQCQRCQGSLHEDVICTSRDCPI | |
| | FYMRKKVRKDLEDQEQLLRRFGPPGPEAW | |
| POLD2 | MFSEQAAQRAHTLLSPPSANNATFARVPVATYTNSSQPFRLGERSFSRQYAHIY | 712 |
| | ATRLIQMRPFLENRAQQHWGSGVGVKKLCELQPEEKCCVVGTLFKAMPLQPSI | |
| | LREVSEEHNLLPQPPRSKYIHPDDELVLEDELQRIKLKGTIDVSKLVTGTVLAVF | |
| | GSVRDDGKFLVEDYCFADLAPQKPAPPLDTDRFVLLVSGLGLGGGGGESLLGT | |
| | QLLVDVVTGQLGDEGEQCSAAHVSRVILAGNLLSHSTQSRDSINKAKYLTKKT | |
| | QAASVEAVKMLDEILLQLSASVPVDVMPGEFDPTNYTLPQQPLHPCMFPLATA | |
| | YSTLQLVTNPYQATIDGVRFLGTSGQNVSDIFRYSSMEDHLEILEWTLRVRHISP | |
| | TAPDTLGCYPFYKTDPFIFPECPHVYFCGNTPSFGSKIIRGPEDQTVLLVTVPDFS | |
| | ATQTACLVNLRSLACQPISFSGFGAEDDDLGGLGLGP | |
| POLD3 | MADQLYLENIDEFVTDQNKIVTYKWLSYTLGVHVNQAKQMLYDYVERKRKE | 713 |
| | NSGAQLHVTYLVSGSLIQNGHSCHKVAVVREDKLEAVKSKLAVTASIHVYSIQ | |
| | KAMLKDSGPLFNTDYDILKSNLQNCSKFSAIQCAAAVPRAPAESSSSSKKFEQSH | |
| | LHMSSETQANNELTTNGHGPPASKQVSQQPKGIMGMFASKAAAKTQETNKET | |
| | KTEAKEVTNASAAGNKAPGKGNMMSNFFGKAAMNKFKVNLDSEQAVKEEKI | |
| | VEQPTVSVTEPKLATPAGLKKSSKKAEPVKVLQKEKKRGKRVALSDDETKETE | |
| | NMRKKRRRIKLPESDSSEDEVFPDSPGAYEAESPSPPPPPSPPLEPVPKTEPEPPSV | |
| | KSSSGENKRKRKRVLKSKTYLDGEGCIVTEKVYESESCTDSEEELNMKTSSVHR | |
| | PPAMTVKKEPREERKGPKKGTAALGKANRQVSITGFFQRK | |
| POLH | MATGQDRVVALVDMDCFFVQVEQRQNPHLRNKPCAVVQYKSWKGGGIIAVS | 714 |
| | YEARAFGVTRSMWADDAKKLCPDLLLAQVRESRGKANLTKYREASVEVMEIM | |
| | SRFAVIERASIDEAYVDLTSAVQERLQKLQGQPISADLLPSTYIEGLPQGPTTAEE | |
| | TVQKEGMRKQGLFQWLDSLQIDNLTSPDLQLTVGAVIVEEMRAAIERETGFQCS | |
| | AGISHNKVLAKLACGLNKPNRQTLVSHGSVPQLFSQMPIRKIRSLGGKLGASVIE | |
| | ILGIEYMGELTQFTESQLQSHFGEKNGSWLYAMCRGIEHDPVKPRQLPKTIGCS | |
| | KNFPGKTALATREQVQWWLLQLAQELEERLTKDRNDNDRVATQLVVSIRVQG | |
| | DKRLSSLRRCCALTRYDAHKMSHDAFTVIKNCNTSGIQTEWSPPLTMLFLCATK | |
| | FSASAPSSSTDITSFLSSDPSSLPKVPVTSSEAKTQGSGPAVTATKKATTSLESFFQ | |
| | KAAERQKVKEASLSSLTAPTQAPMSNSPSKPSLPFQTSQSTGTEPFFKQKSLLLK | |
| | QKQLNNSSVSSPQQNPWSNCKALPNSLPTEYPGCVPVCEGVSKLEESSKATPAE | |
| | MDLAHNSQSMHASSASKSVLEVTQKATPNPSLLAAEDQVPCEKCGSLVPVWD | |
| | MPEHMDYHFALELQKSFLQPHSSNPQVVSAVSHQGKRNPKSPLACTNKRPRPE | |
| | GMQTLESFFKPLTH | |
| POLK | MDSTKEKCDSYKDDLLLRMGLNDNKAGMEGLDKEKINKIIMEATKGSRFYGN | 715 |
| | ELKKEKQVNQRIENMMQQKAQITSQQLRKAQLQVDRFAMELEQSRNLSNTIVH | |
| | IDMDAFYAAVEMRDNPELKDKPIAVGSMSMLSTSNYHARRFGVRAAMPGFIAK | |
| | RLCPQLIIVPPNFDKYRAVSKEVKEILADYDPNFMAMSLDEAYLNITKHLEERQ | |
| | NWPEDKRRYFIKMGSSVENDNPGKEVNKLSEHERSISPLLFEESPSDVQPPGDPF | |
| | QVNFEEQNNPQILQNSVVFGTSAQEVVKEIRFRIEQKTTLTASAGIAPNTMLAKV | |
| | CSDKNKPNGQYQILPNRQAVMDFIKDLPIRKVSGIGKVTEKMLKALGIITCTELY | |
| | QQRALLSLLFSETSWHYFLHISLGLGSTHLTRDGERKSMSVERTFSEINKAEEQY | |
| | SLCQELCSELAQDLQKERLKGRTVTIKLKNVNFEVKTRASTVSSVVSTAEEIFAI | |
| | AKELLKTEIDADFPHPLRLRLMGVRISSFPNEEDRKHQQRSIIGFLQAGNQALSA | |
| | TECTLEKTDKDKFVKPLEMSHKKSFFDKKRSERKWSHQDTFKCEAVNKQSFQT | |
| | SQPFQVLKKKMNENLEISENSDDCQILTCPVCFRAQGCISLEALNKHVDECLDG | |
| | PSISENFKMFSCSHVSATKVNKKENVPASSLCEKQDYEAHPKIKEISSVDCIALV | |
| | DTIDNSSKAESIDALSNKHSKEECSSLPSKSFNIEHCHQNSSSTVSLENEDVGSFR | |
| | QEYRQPYLCEVKTGQALVCPVCNVEQKTSDLTLFNVHVDVCLNKSFIQELRKD | |
| | KFNPVNQPKESSRSTGSSSGVQKAVTRTKRPGLMTKYSTSKKIKPNNPKHTLDIF | |
| | FK | |
| RAD18 | MDSLAESRWPPGLAVMKTIDDLLRCGICFEYFNIAMIIPQCSHNYCSLCIRKELS | 716 |
| | YKTQCPTCCVTVTEPDLKNNRILDELVKSLNFARNHLLQFALESPAKSPASSSSK | |
| | NLAVKVYTPVASRQSLKQGSRLMDNFLIREMSGSTSELLIKENKSKFSPQKEASP | |
| | AAKTKETRSVEEIAPDPSEAKRPEPPSTSTLKQVTKVDCPVCGVNIPESHINKHL | |
| | DSCLSREEKKESLRSSVHKRKPLPKTVYNLLSDRDLKKKLKEHGLSIQGNKQQL | |
| | IKRHQEFVHMYNAQCDALHPKSAAEIVREIENIEKTRMRLEASKLNESVMVFTK | |
| | DQTEKEIDEIHSKYRKKHKSEFQLLVDQARKGYKKIAGMSQKTVTITKEDESTE | |
| | KLSSVCMGQEDNMTSVTNHFSQSKLDSPEELEPDREEDSSSCIDIQEVLSSSESDS | |
| | CNSSSSDIIRDLLEEEEAWEASHKNDLQDTEISPRQNRRTRAAESAEIEPRNKRN | |
| | RN | |
| RBMX | MVEADRPGKLFIGGLNTETNEKALEAVFGKYGRIVEVLLMKDRETNKSRGFAF | 717 |
| | VTFESPADAKDAARDMNGKSLDGKAIKVEQATKPSFESGRRGPPPPPRSRGPPR | |
| | GLRGGRGGSGGTRGPPSRGGHMDDGGYSMNFNMSSSRGPLPVKRGPPPRSGGP | |
| | PPKRSAPSGPVRSSSGMGGRAPVSRGRDSYGGPPRREPLPSRRDVYLSPRDDGY | |
| | STKDSYSSRDYPSSRDTRDYAPPPRDYTYRDYGHSSSRDDYPSRGYSDRDGYGR | |
| | DRDYSDHPSGGSYRDSYESYGNSRSAPPTRGPPPSYGGSSRYDDYSSSRDGYGG | |
| | SRDSYSSSRSDLYSSGRDRVGRQERGLPPSMERGYPPPRDSYSSSSRGAPRGGGR | |
| | GGSRSDRGGGRSRY | |
| REV1 | MRRGGWRKRAENDGWETWGGYMAAKVQKLEEQFRSDAAMQKDGTSSTIFSG | 718 |
| | VAIYVNGYTDPSAEELRKLMMLHGGQYHVYYSRSKTTHIIATNLPNAKIKELKG | |
| | EKVIRPEWIVESIKAGRLLSYIPYQLYTKQSSVQKGLSFNPVCRPEDPLPGPSNIA | |
| | KQLNNRVNHIVKKIETENEVKVNGMNSWNEEDENNDFSFVDLEQTSPGRKQN | |
| | GIPHPRGSTAIFNGHTPSSNGALKTQDCLVPMVNSVASRLSPAFSQEEDKAEKSS | |
| | TDFRDCTLQQLQQSTRNTDALRNPHRTNSFSLSPLHSNTKINGAHHSTVQGPSST | |
| | KSTSSVSTFSKAAPSVPSKPSDCNFISNFYSHSRLHHISMWKCELTEFVNTLQRQS | |
| | NGIFPGREKLKKMKTGRSALVVTDTGDMSVLNSPRHQSCIMHVDMDCFFVSVG | |
| | IRNRPDLKGKPVAVTSNRGTGRAPLRPGANPQLEWQYYQNKILKGKAADIPDSS | |
| | LWENPDSAQANGIDSVLSRAELASCSYEARQLGIKNGMFFGHAKQLCPNLQAVP | |
| | YDFHAYKEVAQTLYETLASYTHNIEAVSCDEALVDITELLAETKLTPDEFANAV | |
| | RMEIKDQTKCAASVGIGSNILLARMATRKAKPDGQYHLKPEEVDDFIRGQLVT | |
| | NLPGVGHSMESKLASLGIKTCGDLQYMTMAKLQKEFGPKTGQMLYRFCRGLD | |
| | DRPVRTEKERKSVSAEINYGIRFTQPKEAEAFLLSLSEEIQRRLEATGMKGKRLT | |
| | LKIMVRKPGAPVETAKFGGHGICDNIARTVTLDQATDNAKIIGKAMLNMFHTM | |
| | KLNISDMRGVGIHVNQLVPTNLNPSTCPSRPSVQSSHFPSGSYSVRDVFQVQKA | |
| | KKSTEEEHKEVFRAAVDLEISSASRTCTFLPPFPAHLPTSPDTNKAESSGKWNGL | |
| | HTPVSVQSRLNLSIEVPSPSQLDQSVLEALPPDLREQVEQVCAVQQAESHGDKK | |
| | KEPVNGCNTGILPQPVGTVLLQIPEPQESNSDAGINLIALPAFSQVDPEVFAALPA | |
| | ELQRELKAAYDQRQRQGENSTHQQSASASVPKNPLLHLKAAVKEKKRNKKKK | |
| | TIGSPKRIQSPLNNKLLNSPAKTLPGACGSPQKLIDGFLKHEGPPAEKPLEELSAS | |
| | TSGVPGLSSLQSDPAGCVRPPAPNLAGAVEFNDVKTLLREWITTISDPMEEDILQ | |
| | VVKYCTDLIEEKDLEKLDLVIKYMKRLMQQSVESVWNMAFDFILDNVQVVLQ | |
| | QTYGSTLKVT | |
| RFWD3 | MAHEAMEYDVQVQLNHAEQQPAPAGMASSQGGPALLQPVPADVVSSQGVPSI | 719 |
| | LQPAPAEVISSQATPPLLQPAPQLSVDLTEVEVLGEDTVENINPRTSEQHRQGSD | |
| | GNHTIPASSLHSMTNFISGLQRLHGMLEFLRPSSSNHSVGPMRTRRRVSASRRAR | |
| | AGGSQRTDSARLRAPLDAYFQVSRTQPDLPATTYDSETRNPVSEELQVSSSSDS | |
| | DSDSSAEYGGVVDQAEESGAVILEEQLAGVSAEQEVTCIDGGKTLPKQPSPQKS | |
| | EPLLPSASMDEEEGDTCTICLEQWTNAGDHRLSALRCGHLFGYRCISTWLKGQV | |
| | RKCPQCNKKARHSDIVVLYARTLRALDTSEQERMKSSLLKEQMLRKQAELESA | |
| | QCRLQLQVLTDKCTRLQRRVQDLQKLTSHQSQNLQQPRGSQAWVLSCSPSSQG | |
| | QHKHKYHFQKTFTVSQAGNCRIMAYCDALSCLVISQPSPQASFLPGFGVKMLST | |
| | ANMKSSQYIPMHGKQIRGLAFSSYLRGLLLSASLDNTIKLTSLETNTVVQTYNA | |
| | GRPVWSCCWCLDEANYIYAGLANGSILVYDVRNTSSHVQELVAQKARCPLVSL | |
| | SYMPRAASAAFPYGGVLAGTLEDASFWEQKMDFSHWPHVLPLEPGGCIDFQTE | |
| | NSSRHCLVTYRPDKNHTTIRSVLMEMSYRLDDTGNPICSCQPVHTFFGGPTCKL | |
| | LTKNAIFQSPENDGNILVCTGDEAANSALLWDAASGSLLQDLQTDQPVLDICPF | |
| | EVNRNSYLATLTEKMVHIYKWE | |
| TIMELESS | MDLHMMNCELLATCSALGYLEGDTYHKEPDCLESVKDLIRYLRHEDETRDVR | 720 |
| | QQLGAAQILQSDLLPILTQHHQDKPLFDAVIRLMVNLTQPALLCFGNLPKEPSFR | |
| | HHFLQVLTYLQAYKEAFASEKAFGVLSETLYELLQLGWEERQEEDNLLIERILL | |
| | LVRNILHVPADLDQEKKIDDDASAHDQLLWAIHLSGLDDLLLFLASSSAEEQWS | |
| | LHVLEIVSLMFRDQNPEQLAGVGQGRLAQERSADFAELEVLRQREMAEKKTRA | |
| | LQRGNRHSRFGGSYIVQGLKSIGERDLIFHKGLHNLRNYSSDLGKQPKKVPKRR | |
| | QAARELSIQRRSALNVRLFLRDFCSEFLENCYNRLMGSVKDHLLREKAQQHDE | |
| | TYYMWALAFFMAFNRAASFRPGLVSETLSVRTFHFIEQNLTNYYEMMLTDRKE | |
| | AASWARRMHLALKAYQELLATVNEMDISPDEAVRESSRIIKNNIFYVMEYRELF | |
| | LALFRKFDERCQPRSFLRDLVETTHLFLKMLERFCRSRGNLVVQNKQKKRRKK | |
| | KKKVLDQAIVSGNVPSSPEEVEAVWPALAEQLQCCAQNSELSMDSVVPFDAAS | |
| | EVPVEEQRAEAMVRIQDCLLAGQAPQALTLLRSAREVWPEGDVFGSQDISPEEE | |
| | IQLLKQILSAPLPRQQGPEERGAEEEEEEEEEEEEELQVVQVSEKEFNFLDYLKRF | |
| | ACSTVVRAYVLLLRSYQQNSAHTNHCIVKMLHRLAHDLKMEALLFQLSVFCLF | |
| | NRLLSDPAAGAYKELVTFAKYILGKFFALAAVNQKAFVELLFWKNTAVVREM | |
| | TEGYGSLDDRSSSRRAPTWSPEEEAHLRELYLANKDVEGQDVVEAILAHLNTVP | |
| | RTRKQIIHHLVQMGLADSVKDFQRKGTHIVLWTGDQELELQRLFEEFRDSDDV | |
| | LGHIMKNITAKRSRARIVDKLLALGLVAERRELYKKRQKKLASSILPNGAESLK | |
| | DFCQEDLEEEENLPEEDSEEEEEGGSEAEQVQGSLVLSNENLGQSLHQEGFSIPL | |
| | LWLQNCLIRAADDREEDGCSQAVPLVPLTEENEEAMENEQFQQLLRKLGVRPP | |
| | ASGQETFWRIPAKLSPTQLRRAAASLSQPEEEQKLQPELQPKVPGEQGSDEEHC | |
| | KEHRAQALRALLLAHKKKAGLASPEEEDAVGKEPLKAAPKKRQLLDSDEEQEE | |
| | DEGRNRAPELGAPGIQKKKRYQIEDDEDD | |
| UBE2I | MSGIALSRLAQERKAWRKDHPFGFVAVPTKNPDGTMNLMNWECAIPGKKGTP | 721 |
| | WEGGLFKLRMLFKDDYPSSPPKCKFEPPLFHPNVYPSGTVCLSILEEDKDWRPAI | |
| | TIKQILLGIQELLNEPNIQDPAQAEAYTIYCQNRVEYEKRVRAQAKKFAPS | |
| UBE2T | MQRASRLKRELHMLATEPPPGITCWQDKDQMDDLRAQILGGANTPYEKGVFK | 722 |
| | LEVIIPERYPFEPPQIRFLTPIYHPNIDSAGRICLDVLKLPPKGAWRPSLNIATVLTS | |
| | IQLLMSEPNPDDPLMADISSEFKYNKPAFLKNARQWTEKHARQKQKADEEEML | |
| | DNLPEAGDSRVHNSTQKRKASQLVGIEKKFHPDV | |
| UNG | MIGQKTLYSFFSPSPARKRHAPSPEPAVQGTGVAGVPEESGDAAAIPAKKAPAG | 723 |
| | QEEPGTPPSSPLSAEQLDRIQRNKAAALLRLAARNVPVGFGESWKKHLSGEFGK | |
| | PYFIKLMGFVAEERKHYTVYPPPHQVFTWTQMCDIKDVKVVILGQDPYHGPNQ | |
| | AHGLCFSVQRPVPPPPSLENIYKELSTDIEDFVHPGHGDLSGWAKQGVLLLNAV | |
| | LTVRAHQANSHKERGWEQFTDAVVSWLNQNSNGLVFLLWGSYAQKKGSAIDR | |
| | KRHHVLQTAHPSPLSVYRGFFGCRHFSKTNELLQKSGKKPIDWKEL | |

Cas9 effector domains

| | | |
|---|---|---|
| SpCas9 | MDKKYSIGLDIGTNSVGWAVITDEYKVPSKKFKVLGNTDRHSIKKNLIGALLFD | 724 |
| | SGETAEATRLKRTARRRYTRRKNRICYLQEIFSNEMAKVDDSFFHRLEESFLVEE | |
| | DKKHERHPIFGNIVDEVAYHEKYPTIYHLRKKLVDSTDKADLRLIYLALAHMIK | |
| | FRGHFLIEGDLNPDNSDVDKLFIQLVQTYNQLFEENPINASGVDAKAILSARLSK | |
| | SRRLENLIAQLPGEKKNGLFGNLIALSLGLTPNFKSNFDLAEDAKLQLSKDTYD | |
| | DDLDNLLAQIGDQYADLFLAAKNLSDAILLSDILRVNTEITKAPLSASMIKRYDE | |
| | HHQDLTLLKALVRQQLPEKYKEIFFDQSKNGYAGYIDGGASQEEFYKFIKPILEK | |
| | MDGTEELLVKLNREDLLRKQRTFDNGSIPHQIHLGELHAILRRQEDFYPFLKDN | |
| | REKIEKILTFRIPYYVGPLARGNSRFAWMTRKSEETITPWNFEEVVDKGASAQSF | |
| | IERMTNFDKNLPNEKVLPKHSLLYEYFTVYNELTKVKYVTEGMRKPAFLSGEQ | |
| | KKAIVDLLFKTNRKVTVKQLKEDYFKKIECFDSVEISGVEDRFNASLGTYHDLL | |
| | KIIKDKDFLDNEENEDILEDIVLTLTLFEDREMIEERLKTYAHLFDDKVMKQLKR | |
| | RRYTGWGRLSRKLINGIRDKQSGKTILDFLKSDGFANRNFMQLIHDDSLTFKEDI | |
| | QKAQVSGQGDSLHEHIANLAGSPAIKKGILQTVKVVDELVKVMGRHKPENIVIE | |
| | MARENQTTQKGQKNSRERMKRIEEGIKELGSQILKEHPVENTQLQNEKLYLYY | |
| | LQNGRDMYVDQELDINRLSDYDVDHIVPQSFLKDDSIDNKVLTRSDKNRGKSD | |
| | NVPSEEVVKKMKNYWRQLLNAKLITQRKFDNLTKAERGGLSELDKAGFIKRQL | |
| | VETRQITKHVAQILDSRMNTKYDENDKLIREVKVITLKSKLVSDFRKDFQFYKV | |
| | REINNYHHAHDAYLNAVVGTALIKKYPKLESEFVYGDYKVYDVRKMIAKSEQE | |
| | IGKATAKYFFYSNIMNFFKTEITLANGEIRKRPLIETNGETGEIVWDKGRDFATV | |
| | RKVLSMPQVNIVKKTEVQTGGFSKESILPKRNSDKLIARKKDWDPKKYGGFDSP | |
| | TVAYSVLVVAKVEKGKSKKLKSVKELLGITIMERSSFEKNPIDFLEAKGYKEVK | |
| | KDLIIKLPKYSLFELENGRKRMLASAGELQKGNELALPSKYVNFLYLASHYEKL | |
| | KGSPEDNEQKQLFVEQHKHYLDEIIEQISEFSKRVILADANLDKVLSAYNKHRD | |
| | KPIREQAENIIHLFTLTNLGAPAAFKYFDTTIDRKRYTSTKEVLDATLIHQSITGL | |
| | YETRIDLSQLGGD | |
| HF-SpCas9n (D10A, | MDKKYSIGLAIGTNSVGWAVITDEYKVPSKKFKVLGNTDRHSIKKNLIGALLFD | 725 |
| N497A, R661A, | SGETAEATRLKRTARRRYTRRKNRICYLQEIFSNEMAKVDDSFFHRLEESFLVEE | |
| Q695A, Q926A) | DKKHERHPIFGNIVDEVAYHEKYPTIYHLRKKLVDSTDKADLRLIYLALAHMIK | |
| | FRGHFLIEGDLNPDNSDVDKLFIQLVQTYNQLFEENPINASGVDAKAILSARLSK | |
| | SRRLENLIAQLPGEKKNGLFGNLIALSLGLTPNFKSNFDLAEDAKLQLSKDTYD | |
| | DDLDNLLAQIGDQYADLFLAAKNLSDAILLSDILRVNTEITKAPLSASMIKRYDE | |
| | HHQDLTLLKALVRQQLPEKYKEIFFDQSKNGYAGYIDGGASQEEFYKFIKPILEK | |
| | MDGTEELLVKLNREDLLRKQRTFDNGSIPHQIHLGELHAILRRQEDFYPFLKDN | |
| | REKIEKILTFRIPYYVGPLARGNSRFAWMTRKSEETITPWNFEEVVDKGASAQSF | |
| | IERMTAFDKNLPNEKVLPKHSLLYEYFTVYNELTKVKYVTEGMRKPAFLSGEQ | |
| | KKAIVDLLFKTNRKVTVKQLKEDYFKKIECFDSVEISGVEDRFNASLGTYHDLL | |
| | KIIKDKDFLDNEENEDILEDIVLTLTLFEDREMIEERLKTYAHLFDDKVMKQLKR | |
| | RRYTGWGALSRKLINGIRDKQSGKTILDFLKSDGFANRNFMALIHDDSLTFKEDI | |
| | QKAQVSGQGDSLHEHIANLAGSPAIKKGILQTVKVVDELVKVMGRHKPENIVIE | |
| | MARENQTTQKGQKNSRERMKRIEEGIKELGSQILKEHPVENTQLQNEKLYLYY | |
| | LQNGRDMYVDQELDINRLSDYDVDHIVPQSFLKDDSIDNKVLTRSDKNRGKSD | |
| | NVPSEEVVKKMKNYWRQLLNAKLITQRKFDNLTKAERGGLSELDKAGFIKRQL | |
| | VETRAITKHVAQILDSRMNTKYDENDKLIREVKVITLKSKLVSDFRKDFQFYKV | |
| | REINNYHHAHDAYLNAVVGTALIKKYPKLESEFVYGDYKVYDVRKMIAKSEQE | |
| | IGKATAKYFFYSNIMNFFKTEITLANGEIRKRPLIETNGETGEIVWDKGRDFATV | |
| | RKVLSMPQVNIVKKTEVQTGGFSKESILPKRNSDKLIARKKDWDPKKYGGFDSP | |
| | TVAYSVLVVAKVEKGKSKKLKSVKELLGITIMERSSFEKNPIDFLEAKGYKEVK | |
| | KDLIIKLPKYSLFELENGRKRMLASAGELQKGNELALPSKYVNFLYLASHYEKL | |
| | KGSPEDNEQKQLFVEQHKHYLDEIIEQISEFSKRVILADANLDKVLSAYNKHRD | |
| | KPIREQAENIIHLFTLTNLGAPAAFKYFDTTIDRKRYTSTKEVLDATLIHQSITGL | |
| | YETRIDLSQLGGD | |
| e-SpCas9 (K848A, | MDKKYSIGLDIGTNSVGWAVITDEYKVPSKKFKVLGNTDRHSIKKNLIGALLFD | 726 |
| K1003A, R1060A) | SGETAEATRLKRTARRRYTRRKNRICYLQEIFSNEMAKVDDSFFHRLEESFLVEE | |
| | DKKHERHPIFGNIVDEVAYHEKYPTIYHLRKKLVDSTDKADLRLIYLALAHMIK | |
| | FRGHFLIEGDLNPDNSDVDKLFIQLVQTYNQLFEENPINASGVDAKAILSARLSK | |
| | SRRLENLIAQLPGEKKNGLFGNLIALSLGLTPNFKSNFDLAEDAKLQLSKDTYD | |
| | DDLDNLLAQIGDQYADLFLAAKNLSDAILLSDILRVNTEITKAPLSASMIKRYDE | |
| | HHQDLTLLKALVRQQLPEKYKEIFFDQSKNGYAGYIDGGASQEEFYKFIKPILEK | |
| | MDGTEELLVKLNREDLLRKQRTFDNGSIPHQIHLGELHAILRRQEDFYPFLKDN | |
| | REKIEKILTFRIPYYVGPLARGNSRFAWMTRKSEETITPWNFEEVVDKGASAQSF | |
| | IERMTNFDKNLPNEKVLPKHSLLYEYFTVYNELTKVKYVTEGMRKPAFLSGEQ | |
| | KKAIVDLLFKTNRKVTVKQLKEDYFKKIECFDSVEISGVEDRFNASLGTYHDLL | |
| | KIIKDKDFLDNEENEDILEDIVLTLTLFEDREMIEERLKTYAHLFDDKVMKQLKR | |
| | RRYTGWGRLSRKLINGIRDKQSGKTILDFLKSDGFANRNFMQLIHDDSLTFKEDI | |
| | QKAQVSGQGDSLHEHIANLAGSPAIKKGILQTVKVVDELVKVMGRHKPENIVIE | |
| | MARENQTTQKGQKNSRERMKRIEEGIKELGSQILKEHPVENTQLQNEKLYLYY | |
| | LQNGRDMYVDQELDINRLSDYDVDHIVPQSFLADDSIDNKVLTRSDKNRGKSD | |
| | NVPSEEVVKKMKNYWRQLLNAKLITQRKFDNLTKAERGGLSELDKAGFIKRQL | |
| | VETRQITKHVAQILDSRMNTKYDENDKLIREVKVITLKSKLVSDFRKDFQFYKV | |
| | REINNYHHAHDAYLNAVVGTALIKKYPALESEFVYGDYKVYDVRKMIAKSEQE | |
| | IGKATAKYFFYSNIMNFFKTEITLANGEIRKAPLIETNGETGEIVWDKGRDFATV | |
| | RKVLSMPQVNIVKKTEVQTGGFSKESILPKRNSDKLIARKKDWDPKKYGGFDSP | |
| | TVAYSVLVVAKVEKGKSKKLKSVKELLGITIMERSSFEKNPIDFLEAKGYKEVK | |
| | KDLIIKLPKYSLFELENGRKRMLASAGELQKGNELALPSKYVNFLYLASHYEKL | |
| | KGSPEDNEQKQLFVEQHKHYLDEIIEQISEFSKRVILADANLDKVLSAYNKHRD | |
| | KPIREQAENIIHLFTLTNLGAPAAFKYFDTTIDRKRYTSTKEVLDATLIHQSITGL | |
| | YETRIDLSQLGGD | |
| Hypa-Cas9 (N692A, | MDKKYSIGLDIGTNSVGWAVITDEYKVPSKKFKVLGNTDRHSIKKNLIGALLFD | 727 |
| M694A, Q695A, | SGETAEATRLKRTARRRYTRRKNRICYLQEIFSNEMAKVDDSFFHRLEESFLVEE | |
| D1135E) | DKKHERHPIFGNIVDEVAYHEKYPTIYHLRKKLVDSTDKADLRLIYLALAHMIK | |
| | FRGHFLIEGDLNPDNSDVDKLFIQLVQTYNQLFEENPINASGVDAKAILSARLSK | |
| | SRRLENLIAQLPGEKKNGLFGNLIALSLGLTPNFKSNFDLAEDAKLQLSKDTYD | |
| | DDLDNLLAQIGDQYADLFLAAKNLSDAILLSDILRVNTEITKAPLSASMIKRYDE | |
| | HHQDLTLLKALVRQQLPEKYKEIFFDQSKNGYAGYIDGGASQEEFYKFIKPILEK | |
| | MDGTEELLVKLNREDLLRKQRTFDNGSIPHQIHLGELHAILRRQEDFYPFLKDN | |
| | REKIEKILTFRIPYYVGPLARGNSRFAWMTRKSEETITPWNFEEVVDKGASAQSF | |
| | IERMTNFDKNLPNEKVLPKHSLLYEYFTVYNELTKVKYVTEGMRKPAFLSGEQ | |
| | KKAIVDLLFKTNRKVTVKQLKEDYFKKIECFDSVEISGVEDRFNASLGTYHDLL | |
| | KIIKDKDFLDNEENEDILEDIVLTLTLFEDREMIEERLKTYAHLFDDKVMKQLKR | |
| | RRYTGWGRLSRKLINGIRDKQSGKTILDFLKSDGFANRAFAALIHDDSLTFKEDI | |
| | QKAQVSGQGDSLHEHIANLAGSPAIKKGILQTVKVVDELVKVMGRHKPENIVIE | |
| | MARENQTTQKGQKNSRERMKRIEEGIKELGSQILKEHPVENTQLQNEKLYLYY | |
| | LQNGRDMYVDQELDINRLSDYDVDHIVPQSFLKDDSIDNKVLTRSDKNRGKSD | |
| | NVPSEEVVKKMKNYWRQLLNAKLITQRKFDNLTKAERGGLSELDKAGFIKRQL | |
| | VETRQITKHVAQILDSRMNTKYDENDKLIREVKVITLKSKLVSDFRKDFQFYKV | |
| | REINNYHHAHDAYLNAVVGTALIKKYPKLESEFVYGDYKVYDVRKMIAKSEQE | |
| | IGKATAKYFFYSNIMNFFKTEITLANGEIRKRPLIETNGETGEIVWDKGRDFATV | |
| | RKVLSMPQVNIVKKTEVQTGGFSKESILPKRNSDKLIARKKDWDPKKYGGFESP | |
| | TVAYSVLVVAKVEKGKSKKLKSVKELLGITIMERSSFEKNPIDFLEAKGYKEVK | |
| | KDLIIKLPKYSLFELENGRKRMLASAGELQKGNELALPSKYVNFLYLASHYEKL | |
| | KGSPEDNEQKQLFVEQHKHYLDEIIEQISEFSKRVILADANLDKVLSAYNKHRD | |
| | KPIREQAENIIHLFTLTNLGAPAAFKYFDTTIDRKRYTSTKEVLDATLIHQSITGL | |
| | YETRIDLSQLGGD | |
| Hypa-nCas9 (D10A, | MDKKYSIGLDIGTNSVGWAVITDEYKVPSKKFKVLGNTDRHSIKKNLIGALLFD | 728 |
| N692A, M694A, | SGETAEATRLKRTARRRYTRRKNRICYLQEIFSNEMAKVDDSFFHRLEESFLVEE | |
| Q695A, D1135E) | DKKHERHPIFGNIVDEVAYHEKYPTIYHLRKKLVDSTDKADLRLIYLALAHMIK | |
| | FRGHFLIEGDLNPDNSDVDKLFIQLVQTYNQLFEENPINASGVDAKAILSARLSK | |
| | SRRLENLIAQLPGEKKNGLFGNLIALSLGLTPNFKSNFDLAEDAKLQLSKDTYD | |
| | DDLDNLLAQIGDQYADLFLAAKNLSDAILLSDILRVNTEITKAPLSASMIKRYDE | |
| | HHQDLTLLKALVRQQLPEKYKEIFFDQSKNGYAGYIDGGASQEEFYKFIKPILEK | |
| | MDGTEELLVKLNREDLLRKQRTFDNGSIPHQIHLGELHAILRRQEDFYPFLKDN | |
| | REKIEKILTFRIPYYVGPLARGNSRFAWMTRKSEETITPWNFEEVVDKGASAQSF | |
| | IERMTNFDKNLPNEKVLPKHSLLYEYFTVYNELTKVKYVTEGMRKPAFLSGEQ | |
| | KKAIVDLLFKTNRKVTVKQLKEDYFKKIECFDSVEISGVEDRFNASLGTYHDLL | |
| | KIIKDKDFLDNEENEDILEDIVLTLTLFEDREMIEERLKTYAHLFDDKVMKQLKR | |
| | RRYTGWGRLSRKLINGIRDKQSGKTILDFLKSDGFANRAFAALIHDDSLTFKEDI | |
| | QKAQVSGQGDSLHEHIANLAGSPAIKKGILQTVKVVDELVKVMGRHKPENIVIE | |
| | MARENQTTQKGQKNSRERMKRIEEGIKELGSQILKEHPVENTQLQNEKLYLYY | |
| | LQNGRDMYVDQELDINRLSDYDVDHIVPQSFLKDDSIDNKVLTRSDKNRGKSD | |
| | NVPSEEVVKKMKNYWRQLLNAKLITQRKFDNLTKAERGGLSELDKAGFIKRQL | |
| | VETRQITKHVAQILDSRMNTKYDENDKLIREVKVITLKSKLVSDFRKDFQFYKV | |
| | REINNYHHAHDAYLNAVVGTALIKKYPKLESEFVYGDYKVYDVRKMIAKSEQE | |
| | IGKATAKYFFYSNIMNFFKTEITLANGEIRKRPLIETNGETGEIVWDKGRDFATV | |
| | RKVLSMPQVNIVKKTEVQTGGFSKESILPKRNSDKLIARKKDWDPKKYGGFESP | |
| | TVAYSVLVVAKVEKGKSKKLKSVKELLGITIMERSSFEKNPIDFLEAKGYKEVK | |
| | KDLIIKLPKYSLFELENGRKRMLASAGELQKGNELALPSKYVNFLYLASHYEKL | |
| | KGSPEDNEQKQLFVEQHKHYLDEIIEQISEFSKRVILADANLDKVLSAYNKHRD | |
| | KPIREQAENIIHLFTLTNLGAPAAFKYFDTTIDRKRYTSTKEVLDATLIHQSITGL | |
| | YETRIDLSQLGGD | |
| e-HF-SpCas9n (D10A, | MDKKYSIGLAIGTNSVGWAVITDEYKVPSKKFKVLGNTDRHSIKKNLIGALLFD | 729 |
| K848A, K1003A, | SGETAEATRLKRTARRRYTRRKNRICYLQEIFSNEMAKVDDSFFHRLEESFLVEE | |
| R1060A//N497A, | DKKHERHPIFGNIVDEVAYHEKYPTIYHLRKKLVDSTDKADLRLIYLALAHMIK | |
| R661A, Q695A, | FRGHFLIEGDLNPDNSDVDKLFIQLVQTYNQLFEENPINASGVDAKAILSARLSK | |
| Q926A) | SRRLENLIAQLPGEKKNGLFGNLIALSLGLTPNFKSNFDLAEDAKLQLSKDTYD | |
| | DDLDNLLAQIGDQYADLFLAAKNLSDAILLSDILRVNTEITKAPLSASMIKRYDE | |
| | HHQDLTLLKALVRQQLPEKYKEIFFDQSKNGYAGYIDGGASQEEFYKFIKPILEK | |
| | MDGTEELLVKLNREDLLRKQRTFDNGSIPHQIHLGELHAILRRQEDFYPFLKDN | |
| | REKIEKILTFRIPYYVGPLARGNSRFAWMTRKSEETITPWNFEEVVDKGASAQSF | |
| | IERMTAFDKNLPNEKVLPKHSLLYEYFTVYNELTKVKYVTEGMRKPAFLSGEQ | |
| | KKAIVDLLFKTNRKVTVKQLKEDYFKKIECFDSVEISGVEDRFNASLGTYHDLL | |
| | KIIKDKDFLDNEENEDILEDIVLTLTLFEDREMIEERLKTYAHLFDDKVMKQLKR | |
| | RRYTGWGALSRKLINGIRDKQSGKTILDFLKSDGFANRNFMALIHDDSLTFKEDI | |
| | QKAQVSGQGDSLHEHIANLAGSPAIKKGILQTVKVVDELVKVMGRHKPENIVIE | |
| | MARENQTTQKGQKNSRERMKRIEEGIKELGSQILKEHPVENTQLQNEKLYLYY | |
| | LQNGRDMYVDQELDINRLSDYDVDHIVPQSFLADDSIDNKVLTRSDKNRGKSD | |
| | NVPSEEVVKKMKNYWRQLLNAKLITQRKFDNLTKAERGGLSELDKAGFIKRQL | |
| | VETRAITKHVAQILDSRMNTKYDENDKLIREVKVITLKSKLVSDFRKDFQFYKV | |
| | REINNYHHAHDAYLNAVVGTALIKKYPALESEFVYGDYKVYDVRKMIAKSEQE | |
| | IGKATAKYFFYSNIMNFFKTEITLANGEIRKAPLIETNGETGEIVWDKGRDFATV | |
| | RKVLSMPQVNIVKKTEVQTGGFSKESILPKRNSDKLIARKKDWDPKKYGGFDSP | |
| | TVAYSVLVVAKVEKGKSKKLKSVKELLGITIMERSSFEKNPIDFLEAKGYKEVK | |
| | KDLIIKLPKYSLFELENGRKRMLASAGELQKGNELALPSKYVNFLYLASHYEKL | |
| | KGSPEDNEQKQLFVEQHKHYLDEIIEQISEFSKRVILADANLDKVLSAYNKHRD | |
| | KPIREQAENIIHLFTLTNLGAPAAFKYFDTTIDRKRYTSTKEVLDATLIHQSITGL | |
| | YETRIDLSQLGGD | |
| e-Hypa-SpCas9n | MDKKYSIGLAIGTNSVGWAVITDEYKVPSKKFKVLGNTDRHSIKKNLIGALLFD | 730 |
| (D10A, K848A, | SGETAEATRLKRTARRRYTRRKNRICYLQEIFSNEMAKVDDSFFHRLEESFLVEE | |
| K1003A, | DKKHERHPIFGNIVDEVAYHEKYPTIYHLRKKLVDSTDKADLRLIYLALAHMIK | |
| R1060A//N692A, | FRGHFLIEGDLNPDNSDVDKLFIQLVQTYNQLFEENPINASGVDAKAILSARLSK | |
| M694A, Q695A, | SRRLENLIAQLPGEKKNGLFGNLIALSLGLTPNFKSNFDLAEDAKLQLSKDTYD | |
| D1135E) | DDLDNLLAQIGDQYADLFLAAKNLSDAILLSDILRVNTEITKAPLSASMIKRYDE | |
| | HHQDLTLLKALVRQQLPEKYKEIFFDQSKNGYAGYIDGGASQEEFYKFIKPILEK | |
| | MDGTEELLVKLNREDLLRKQRTFDNGSIPHQIHLGELHAILRRQEDFYPFLKDN | |
| | REKIEKILTFRIPYYVGPLARGNSRFAWMTRKSEETITPWNFEEVVDKGASAQSF | |
| | TERMTNFDKNLPNEKVLPKHSLLYEYFTVYNELTKVKYVTEGMRKPAFLSGEQ | |
| | KKAIVDLLFKTNRKVTVKQLKEDYFKKIECFDSVEISGVEDRFNASLGTYHDLL | |
| | KIIKDKDFLDNEENEDILEDIVLTLTLFEDREMIEERLKTYAHLFDDKVMKQLKR | |
| | RRYTGWGRLSRKLINGIRDKQSGKTILDFLKSDGFANRAFAALIHDDSLTFKEDI | |
| | QKAQVSGQGDSLHEHIANLAGSPAIKKGILQTVKVVDELVKVMGRHKPENIVIE | |
| | MARENQTTQKGQKNSRERMKRIEEGIKELGSQILKEHPVENTQLQNEKLYLYY | |
| | LQNGRDMYVDQELDINRLSDYDVDHIVPQSFLADDSIDNKVLTRSDKNRGKSD | |
| | NVPSEEVVKKMKNYWRQLLNAKLITQRKFDNLTKAERGGLSELDKAGFIKRQL | |
| | VETRQITKHVAQILDSRMNTKYDENDKLIREVKVITLKSKLVSDFRKDFQFYKV | |
| | REINNYHHAHDAYLNAVVGTALIKKYPALESEFVYGDYKVYDVRKMIAKSEQE | |
| | IGKATAKYFFYSNIMNFFKTEITLANGEIRKAPLIETNGETGEIVWDKGRDFATV | |
| | RKVLSMPQVNIVKKTEVQTGGFSKESILPKRNSDKLIARKKDWDPKKYGGFESP | |
| | TVAYSVLVVAKVEKGKSKKLKSVKELLGITIMERSSFEKNPIDFLEAKGYKEVK | |
| | KDLIIKLPKYSLFELENGRKRMLASAGELQKGNELALPSKYVNFLYLASHYEKL | |
| | KGSPEDNEQKQLFVEQHKHYLDEIIEQISEFSKRVILADANLDKVLSAYNKHRD | |
| | KPIREQAENIIHLFTLTNLGAPAAFKYFDTTIDRKRYTSTKEVLDATLIHQSITGL | |
| | YETRIDLSQLGGD | |
| HF-Hypa-SpCas9n | MDKKYSIGLAIGTNSVGWAVITDEYKVPSKKFKVLGNTDRHSIKKNLIGALLFD | 731 |
| (D10A, N497A, | SGETAEATRLKRTARRRYTRRKNRICYLQEIFSNEMAKVDDSFFHRLEESFLVEE | |
| R661A, Q695A, | DKKHERHPIFGNIVDEVAYHEKYPTIYHLRKKLVDSTDKADLRLIYLALAHMIK | |
| Q926A//N692A, | FRGHFLIEGDLNPDNSDVDKLFIQLVQTYNQLFEENPINASGVDAKAILSARLSK | |
| M694A, Q695A, | SRRLENLIAQLPGEKKNGLFGNLIALSLGLTPNFKSNFDLAEDAKLQLSKDTYD | |
| D1135E) | DDLDNLLAQIGDQYADLFLAAKNLSDAILLSDILRVNTEITKAPLSASMIKRYDE | |
| | HHQDLTLLKALVRQQLPEKYKEIFFDQSKNGYAGYIDGGASQEEFYKFIKPILEK | |
| | MDGTEELLVKLNREDLLRKQRTFDNGSIPHQIHLGELHAILRRQEDFYPFLKDN | |
| | REKIEKILTFRIPYYVGPLARGNSRFAWMTRKSEETITPWNFEEVVDKGASAQSF | |
| | IERMTAFDKNLPNEKVLPKHSLLYEYFTVYNELTKVKYVTEGMRKPAFLSGEQ | |
| | KKAIVDLLFKTNRKVTVKQLKEDYFKKIECFDSVEISGVEDRFNASLGTYHDLL | |
| | KIIKDKDFLDNEENEDILEDIVLTLTLFEDREMIEERLKTYAHLFDDKVMKQLKR | |
| | RRYTGWGRLSRKLINGIRDKQSGKTILDFLKSDGFANRAFAALIHDDSLTFKEDI | |
| | QKAQVSGQGDSLHEHIANLAGSPAIKKGILQTVKVVDELVKVMGRHKPENIVIE | |
| | MARENQTTQKGQKNSRERMKRIEEGIKELGSQILKEHPVENTQLQNEKLYLYY | |
| | LQNGRDMYVDQELDINRLSDYDVDHIVPQSFLKDDSIDNKVLTRSDKNRGKSD | |
| | NVPSEEVVKKMKNYWRQLLNAKLITQRKFDNLTKAERGGLSELDKAGFIKRQL | |
| | VETRAITKHVAQILDSRMNTKYDENDKLIREVKVITLKSKLVSDFRKDFQFYKV | |
| | REINNYHHAHDAYLNAVVGTALIKKYPKLESEFVYGDYKVYDVRKMIAKSEQE | |
| | IGKATAKYFFYSNIMNFFKTEITLANGEIRKRPLIETNGETGEIVWDKGRDFATV | |
| | RKVLSMPQVNIVKKTEVQTGGFSKESILPKRNSDKLIARKKDWDPKKYGGFESP | |
| | TVAYSVLVVAKVEKGKSKKLKSVKELLGITIMERSSFEKNPIDFLEAKGYKEVK | |
| | KDLIIKLPKYSLFELENGRKRMLASAGELQKGNELALPSKYVNFLYLASHYEKL | |
| | KGSPEDNEQKQLFVEQHKHYLDEIIEQISEFSKRVILADANLDKVLSAYNKHRD | |
| | KPIREQAENIIHLFTLTNLGAPAAFKYFDTTIDRKRYTSTKEVLDATLIHQSITGL | |
| | YETRIDLSQLGGD | |
| e-HF-Hypa-SpCas9n | MDKKYSIGLAIGTNSVGWAVITDEYKVPSKKFKVLGNTDRHSIKKNLIGALLFD | 732 |
| (D10A, K848A, | SGETAEATRLKRTARRRYTRRKNRICYLQEIFSNEMAKVDDSFFHRLEESFLVEE | |
| K1003A, R1060A// | DKKHERHPIFGNIVDEVAYHEKYPTIYHLRKKLVDSTDKADLRLIYLALAHMIK | |
| //N497A, R661A, | FRGHFLIEGDLNPDNSDVDKLFIQLVQTYNQLFEENPINASGVDAKAILSARLSK | |
| Q695A, | SRRLENLIAQLPGEKKNGLFGNLIALSLGLTPNFKSNFDLAEDAKLQLSKDTYD | |
| Q926A//N692A, | DDLDNLLAQIGDQYADLFLAAKNLSDAILLSDILRVNTEITKAPLSASMIKRYDE | |
| M694A, Q695A, | HHQDLTLLKALVRQQLPEKYKEIFFDQSKNGYAGYIDGGASQEEFYKFIKPILEK | |
| D1135E) * | MDGTEELLVKLNREDLLRKQRTFDNGSIPHQIHLGELHAILRRQEDFYPFLKDN | |
| | REKIEKILTFRIPYYVGPLARGNSRFAWMTRKSEETITPWNFEEVVDKGASAQSF | |
| | IERMTAFDKNLPNEKVLPKHSLLYEYFTVYNELTKVKYVTEGMRKPAFLSGEQ | |
| | KKAIVDLLFKTNRKVTVKQLKEDYFKKIECFDSVEISGVEDRFNASLGTYHDLL | |
| | KIIKDKDFLDNEENEDILEDIVLTLTLFEDREMIEERLKTYAHLFDDKVMKQLKR | |
| | RRYTGWGRLSRKLINGIRDKQSGKTILDFLKSDGFANRAFAALIHDDSLTFKEDI | |
| | QKAQVSGQGDSLHEHIANLAGSPAIKKGILQTVKVVDELVKVMGRHKPENIVIE | |
| | MARENQTTQKGQKNSRERMKRIEEGIKELGSQILKEHPVENTQLQNEKLYLYY | |
| | LQNGRDMYVDQELDINRLSDYDVDHIVPQSFLADDSIDNKVLTRSDKNRGKSD | |
| | NVPSEEVVKKMKNYWRQLLNAKLITQRKFDNLTKAERGGLSELDKAGFIKRQL | |
| | VETRAITKHVAQILDSRMNTKYDENDKLIREVKVITLKSKLVSDFRKDFQFYKV | |
| | REINNYHHAHDAYLNAVVGTALIKKYPALESEFVYGDYKVYDVRKMIAKSEQE | |
| | IGKATAKYFFYSNIMNFFKTEITLANGEIRKAPLIETNGETGEIVWDKGRDFATV | |
| | RKVLSMPQVNIVKKTEVQTGGFSKESILPKRNSDKLIARKKDWDPKKYGGFESP | |
| | TVAYSVLVVAKVEKGKSKKLKSVKELLGITIMERSSFEKNPIDFLEAKGYKEVK | |
| | KDLIIKLPKYSLFELENGRKRMLASAGELQKGNELALPSKYVNFLYLASHYEKL | |
| | KGSPEDNEQKQLFVEQHKHYLDEIIEQISEFSKRVILADANLDKVLSAYNKHRD | |
| | KPIREQAENIIHLFTLTNLGAPAAFKYFDTTIDRKRYTSTKEVLDATLIHQSITGL | |
| | YETRIDLSQLGGD | |
| Sniper-nCas9 (D10A, | MDKKYSIGLAIGTNSVGWAVITDEYKVPSKKFKVLGNTDRHSIKKNLIGALLFD | 733 |
| F539S, M763I, K890N) | SGETAEATRLKRTARRRYTRRKNRICYLQEIFSNEMAKVDDSFFHRLEESFLVEE | |
| | DKKHERHPIFGNIVDEVAYHEKYPTIYHLRKKLVDSTDKADLRLIYLALAHMIK | |
| | FRGHFLIEGDLNPDNSDVDKLFIQLVQTYNQLFEENPINASGVDAKAILSARLSK | |
| | SRRLENLIAQLPGEKKNGLFGNLIALSLGLTPNFKSNFDLAEDAKLQLSKDTYD | |
| | DDLDNLLAQIGDQYADLFLAAKNLSDAILLSDILRVNTEITKAPLSASMIKRYDE | |
| | HHQDLTLLKALVRQQLPEKYKEIFFDQSKNGYAGYIDGGASQEEFYKFIKPILEK | |
| | MDGTEELLVKLNREDLLRKQRTFDNGSIPHQIHLGELHAILRRQEDFYPFLKDN | |
| | REKIEKILTFRIPYYVGPLARGNSRFAWMTRKSEETITPWNFEEVVDKGASAQSF | |
| | IERMTNFDKNLPNEKVLPKHSLLYEYFTVYNELTKVKYVTEGMRKPASLSGEQ | |
| | KKAIVDLLFKTNRKVTVKQLKEDYFKKIECFDSVEISGVEDRFNASLGTYHDLL | |
| | KIIKDKDFLDNEENEDILEDIVLTLTLFEDREMIEERLKTYAHLFDDKVMKQLKR | |
| | RRYTGWGRLSRKLINGIRDKQSGKTILDFLKSDGFANRNFMQLIHDDSLTFKEDI | |
| | QKAQVSGQGDSLHEHIANLAGSPAIKKGILQTVKVVDELVKVMGRHKPENIVIE | |
| | IARENQTTQKGQKNSRERMKRIEEGIKELGSQILKEHPVENTQLQNEKLYLYYL | |
| | QNGRDMYVDQELDINRLSDYDVDHIVPQSFLKDDSIDNKVLTRSDKNRGKSDN | |
| | VPSEEVVKKMKNYWRQLLNANLITQRKFDNLTKAERGGLSELDKAGFIKRQLV | |
| | ETRQITKHVAQILDSRMNTKYDENDKLIREVKVITLKSKLVSDFRKDFQFYKVR | |
| | EINNYHHAHDAYLNAVVGTALIKKYPKLESEFVYGDYKVYDVRKMIAKSEQEI | |
| | GKATAKYFFYSNIMNFFKTEITLANGEIRKRPLIETNGETGEIVWDKGRDFATVR | |
| | KVLSMPQVNIVKKTEVQTGGFSKESILPKRNSDKLIARKKDWDPKKYGGFDSPT | |
| | VAYSVLVVAKVEKGKSKKLKSVKELLGITIMERSSFEKNPIDFLEAKGYKEVKK | |
| | DLIIKLPKYSLFELENGRKRMLASAGELQKGNELALPSKYVNFLYLASHYEKLK | |
| | GSPEDNEQKQLFVEQHKHYLDEIIEQISEFSKRVILADANLDKVLSAYNKHRDKP | |
| | IREQAENIIHLFTLTNLGAPAAFKYFDTTIDRKRYTSTKEVLDATLIHQSITGLYE | |
| | TRIDLSQLGGD | |
| Cas9-NG (L111R, | MDKKYSIGLDIGTNSVGWAVITDEYKVPSKKFKVLGNTDRHSIKKNLIGALLFD | 734 |
| D1135V, G1218R, | SGETAEATRLKRTARRRYTRRKNRICYLQEIFSNEMAKVDDSFFHRLEESFLVEE | |
| E1219F, A1322R, | DKKHERHPIFGNIVDEVAYHEKYPTIYHLRKKLVDSTDKADLRLIYLALAHMIK | |
| R1335V, T1337R) | FRGHFLIEGDLNPDNSDVDKLFIQLVQTYNQLFEENPINASGVDAKAILSARLSK | |
| | SRRLENLIAQLPGEKKNGLFGNLIALSLGLTPNFKSNFDLAEDAKLQLSKDTYD | |
| | DDLDNLLAQIGDQYADLFLAAKNLSDAILLSDILRVNTEITKAPLSASMIKRYDE | |
| | HHQDLTLLKALVRQQLPEKYKEIFFDQSKNGYAGYIDGGASQEEFYKFIKPILEK | |
| | MDGTEELLVKLNREDLLRKQRTFDNGSIPHQIHLGELHAILRRQEDFYPFLKDN | |
| | REKIEKILTFRIPYYVGPLARGNSRFAWMTRKSEETITPWNFEEVVDKGASAQSF | |
| | IERMTNFDKNLPNEKVLPKHSLLYEYFTVYNELTKVKYVTEGMRKPAFLSGEQ | |
| | KKAIVDLLFKTNRKVTVKQLKEDYFKKIECFDSVEISGVEDRFNASLGTYHDLL | |
| | KIIKDKDFLDNEENEDILEDIVLTLTLFEDREMIEERLKTYAHLFDDKVMKQLKR | |
| | RRYTGWGRLSRKLINGIRDKQSGKTILDFLKSDGFANRNFMQLIHDDSLTFKEDI | |
| | QKAQVSGQGDSLHEHIANLAGSPAIKKGILQTVKVVDELVKVMGRHKPENIVIE | |
| | MARENQTTQKGQKNSRERMKRIEEGIKELGSQILKEHPVENTQLQNEKLYLYY | |
| | LQNGRDMYVDQELDINRLSDYDVDHIVPQSFLKDDSIDNKVLTRSDKNRGKSD | |
| | NVPSEEVVKKMKNYWRQLLNAKLITQRKFDNLTKAERGGLSELDKAGFIKRQL | |
| | VETRQITKHVAQILDSRMNTKYDENDKLIREVKVITLKSKLVSDFRKDFQFYKV | |
| | REINNYHHAHDAYLNAVVGTALIKKYPKLESEFVYGDYKVYDVRKMIAKSEQE | |
| | IGKATAKYFFYSNIMNFFKTEITLANGEIRKRPLIETNGETGEIVWDKGRDFATV | |
| | RKVLSMPQVNIVKKTEVQTGGFSKESIRPKRNSDKLIARKKDWDPKKYGGFVSP | |
| | TVAYSVLVVAKVEKGKSKKLKSVKELLGITIMERSSFEKNPIDFLEAKGYKEVK | |
| | KDLIIKLPKYSLFELENGRKRMLASARFLQKGNELALPSKYVNFLYLASHYEKL | |
| | KGSPEDNEQKQLFVEQHKHYLDEIIEQISEFSKRVILADANLDKVLSAYNKHRD | |
| | KPIREQAENIIHLFTLTNLGAPRAFKYFDTTIDRKVYRSTKEVLDATLIHQSITGL | |
| | YETRIDLSQLGGD | |
| nCas9-NG (D10A, | MDKKYSIGLAIGTNSVGWAVITDEYKVPSKKFKVLGNTDRHSIKKNLIGALLFD | 735 |
| L111R, D1135V, | SGETAEATRLKRTARRRYTRRKNRICYLQEIFSNEMAKVDDSFFHRLEESFLVEE | |
| G1218R, E1219F, | DKKHERHPIFGNIVDEVAYHEKYPTIYHLRKKLVDSTDKADLRLIYLALAHMIK | |
| A1322R, R1335V, | FRGHFLIEGDLNPDNSDVDKLFIQLVQTYNQLFEENPINASGVDAKAILSARLSK | |
| T1337R) | SRRLENLIAQLPGEKKNGLFGNLIALSLGLTPNFKSNFDLAEDAKLQLSKDTYD | |
| | DDLDNLLAQIGDQYADLFLAAKNLSDAILLSDILRVNTEITKAPLSASMIKRYDE | |
| | HHQDLTLLKALVRQQLPEKYKEIFFDQSKNGYAGYIDGGASQEEFYKFIKPILEK | |
| | MDGTEELLVKLNREDLLRKQRTFDNGSIPHQIHLGELHAILRRQEDFYPFLKDN | |
| | REKIEKILTFRIPYYVGPLARGNSRFAWMTRKSEETITPWNFEEVVDKGASAQSF | |
| | TERMTNFDKNLPNEKVLPKHSLLYEYFTVYNELTKVKYVTEGMRKPAFLSGEQ | |
| | KKAIVDLLFKTNRKVTVKQLKEDYFKKIECFDSVEISGVEDRFNASLGTYHDLL | |
| | KIIKDKDFLDNEENEDILEDIVLTLTLFEDREMIEERLKTYAHLFDDKVMKQLKR | |
| | RRYTGWGRLSRKLINGIRDKQSGKTILDFLKSDGFANRNFMQLIHDDSLTFKEDI | |
| | QKAQVSGQGDSLHEHIANLAGSPAIKKGILQTVKVVDELVKVMGRHKPENIVIE | |
| | MARENQTTQKGQKNSRERMKRIEEGIKELGSQILKEHPVENTQLQNEKLYLYY | |
| | LQNGRDMYVDQELDINRLSDYDVDHIVPQSFLKDDSIDNKVLTRSDKNRGKSD | |
| | NVPSEEVVKKMKNYWRQLLNAKLITQRKFDNLTKAERGGLSELDKAGFIKRQL | |
| | VETRQITKHVAQILDSRMNTKYDENDKLIREVKVITLKSKLVSDFRKDFQFYKV | |
| | REINNYHHAHDAYLNAVVGTALIKKYPKLESEFVYGDYKVYDVRKMIAKSEQE | |
| | IGKATAKYFFYSNIMNFFKTEITLANGEIRKRPLIETNGETGEIVWDKGRDFATV | |
| | RKVLSMPQVNIVKKTEVQTGGFSKESIRPKRNSDKLIARKKDWDPKKYGGFVSP | |
| | TVAYSVLVVAKVEKGKSKKLKSVKELLGITIMERSSFEKNPIDFLEAKGYKEVK | |
| | KDLIIKLPKYSLFELENGRKRMLASARFLQKGNELALPSKYVNFLYLASHYEKL | |
| | KGSPEDNEQKQLFVEQHKHYLDEIIEQISEFSKRVILADANLDKVLSAYNKHRD | |
| | KPIREQAENIIHLFTLTNLGAPRAFKYFDTTIDRKVYRSTKEVLDATLIHQSITGL | |
| | YETRIDLSQLGGD | |
| HF-nCas9-NG (D10A, | MDKKYSIGLAIGTNSVGWAVITDEYKVPSKKFKVLGNTDRHSIKKNLIGALLFD | 736 |
| N497A, R661A, | SGETAEATRLKRTARRRYTRRKNRICYLQEIFSNEMAKVDDSFFHRLEESFLVEE | |
| Q695A, | DKKHERHPIFGNIVDEVAYHEKYPTIYHLRKKLVDSTDKADLRLIYLALAHMIK | |
| Q926A//L111R, | FRGHFLIEGDLNPDNSDVDKLFIQLVQTYNQLFEENPINASGVDAKAILSARLSK | |
| D1135V, G1218R, | SRRLENLIAQLPGEKKNGLFGNLIALSLGLTPNFKSNFDLAEDAKLQLSKDTYD | |
| E1219F, A1322R, | DDLDNLLAQIGDQYADLFLAAKNLSDAILLSDILRVNTEITKAPLSASMIKRYDE | |
| R1335V, T1337R//) | HHQDLTLLKALVRQQLPEKYKEIFFDQSKNGYAGYIDGGASQEEFYKFIKPILEK | |
| | MDGTEELLVKLNREDLLRKQRTFDNGSIPHQIHLGELHAILRRQEDFYPFLKDN | |
| | REKIEKILTFRIPYYVGPLARGNSRFAWMTRKSEETITPWNFEEVVDKGASAQSF | |
| | IERMTAFDKNLPNEKVLPKHSLLYEYFTVYNELTKVKYVTEGMRKPAFLSGEQ | |
| | KKAIVDLLFKTNRKVTVKQLKEDYFKKIECFDSVEISGVEDRFNASLGTYHDLL | |
| | KIIKDKDFLDNEENEDILEDIVLTLTLFEDREMIEERLKTYAHLFDDKVMKQLKR | |
| | RRYTGWGALSRKLINGIRDKQSGKTILDFLKSDGFANRNFMALIHDDSLTFKEDI | |
| | QKAQVSGQGDSLHEHIANLAGSPAIKKGILQTVKVVDELVKVMGRHKPENIVIE | |
| | MARENQTTQKGQKNSRERMKRIEEGIKELGSQILKEHPVENTQLQNEKLYLYY | |
| | LQNGRDMYVDQELDINRLSDYDVDHIVPQSFLKDDSIDNKVLTRSDKNRGKSD | |
| | NVPSEEVVKKMKNYWRQLLNAKLITQRKFDNLTKAERGGLSELDKAGFIKRQL | |
| | VETRAITKHVAQILDSRMNTKYDENDKLIREVKVITLKSKLVSDFRKDFQFYKV | |
| | REINNYHHAHDAYLNAVVGTALIKKYPKLESEFVYGDYKVYDVRKMIAKSEQE | |
| | IGKATAKYFFYSNIMNFFKTEITLANGEIRKRPLIETNGETGEIVWDKGRDFATV | |
| | RKVLSMPQVNIVKKTEVQTGGFSKESIRPKRNSDKLIARKKDWDPKKYGGFVSP | |
| | TVAYSVLVVAKVEKGKSKKLKSVKELLGITIMERSSFEKNPIDFLEAKGYKEVK | |
| | KDLIIKLPKYSLFELENGRKRMLASARFLQKGNELALPSKYVNFLYLASHYEKL | |
| | KGSPEDNEQKQLFVEQHKHYLDEIIEQISEFSKRVILADANLDKVLSAYNKHRD | |
| | KPIREQAENIIHLFTLTNLGAPRAFKYFDTTIDRKVYRSTKEVLDATLIHQSITGL | |
| | YETRIDLSQLGGD | |

Cellular DNA polymerase domains

| | | |
|---|---|---|
| PolB | MSKRKAPQETLNGGITDMLTELANFEKNVSQAIHKYNAYRKAASVIAK | 737 |
| | YPHKIKSGAEAKKLPGVGTKIAEKIDEFLATGKLRKLEKIRQDDTSSSIN | |
| | FLTRVSGIGPSAARKFVDEGIKTLEDLRKNEDKLNHHQRIGLKYFGDFE | |
| | KRIPREEMLQMQDIVLNEVKKVDSEYIATVCGSFRRGAESSGDMDVLL | |
| | THPSFTSESTKQPKLLHQVVEQLQKVHFITDTLSKGETKFMGVCQLPSK | |
| | NDEKEYPHRRIDIRLIPKDQYYCGVLYFTGSDIFNKNMRAHALEKGFTI | |
| | NEYTIRPLGVTGVAGEPLPVDSEKDIFDYIQWKYREPKDRSE | |
| PolD1 | MDGKRRPGPGPGVPPKRARGGLWDDDDAPRPSQFEEDLALMEEMEAE | 738 |
| | HRLQEQEEEELQSVLEGVADGQVPPSAIDPRWLRPTPPALDPQTEPLIFQ | |
| | QLEIDHYVGPAQPVPGGPPPSHGSVPVLRAFGVTDEGFSVCCHIHGFAP | |
| | YFYTPAPPGFGPEHMGDLQRELNLAISRDSRGGRELTGPAVLAVELCSR | |
| | ESMFGYHGHGPSPFLRITVALPRLVAPARRLLEQGIRVAGLGTPSFAPY | |
| | EANVDFEIRFMVDTDIVGCNWLELPAGKYALRLKEKATQCQLEADVL | |
| | WSDVVSHPPEGPWQRIAPLRVLSFDIECAGRKGIFPEPERDPVIQICSLGL | |
| | RWGEPEPFLRLALTLRPCAPILGAKVQSYEKEEDLLQAWSTFIRIMDPD | |
| | VITGYNIQNFDLPYLISRAQTLKVQTFPFLGRVAGLCSNIRDSSFQSKQT | |
| | GRRDTKVVSMVGRVQMDMLQVLLREYKLRSYTLNAVSFHFLGEQKE | |
| | DVQHSIITDLQNGNDQTRRRLAVYCLKDAYLPLRLLERLMVLVNAVE | |
| | MARVTGVPLSYLLSRGQQVKVVSQLLRQAMHEGLLMPVVKSEGGED | |
| | YTGATVIEPLKGYYDVPIATLDFSSLYPSIMMAHNLCYTTLLRPGTAQK | |
| | LGLTEDQFIRTPTGDEFVKTSVRKGLLPQILENLLSARKRAKAELAKET | |
| | DPLRRQVLDGRQLALKVSANSVYGFTGAQVGKLPCLEISQSVTGFGRQ | |
| | MIEKTKQLVESKYTVENGYSTSAKVVYGDTDSVMCRFGVSSVAEAMA | |
| | LGREAADWVSGHFPSPIRLEFEKVYFPYLLISKKRYAGLLFSSRPDAHD | |
| | RMDCKGLEAVRRDNCPLVANLVTASLRRLLIDRDPEGAVAHAQDVISD | |
| | LLCNRIDISQLVITKELTRAASDYAGKQAHVELAERMRKRDPGSAPSLG | |
| | DRVPYVIISAAKGVAAYMKSEDPLFVLEHSLPIDTQYYLEQQLAKPLLR | |
| | IFEPILGEGRAEAVLLRGDHTRCKTVLTGKVGGLLAFAKRRNCCIGCRT | |
| | VLSHQGAVCEFCQPRESELYQKEVSHLNALEERFSRLWTQCQRCQGSL | |
| | HEDVICTSRDCPIFYMRKKVRKDLEDQEQLLRRFGPPGPEAW | |
| PolH | MATGQDRVVALVDMDCFFVQVEQRQNPHLRNKPCAVVQYKSWKGG | 739 |
| | GIIAVSYEARAFGVTRSMWADDAKKLCPDLLLAQVRESRGKANLTKY | |
| | REASVEVMEIMSRFAVIERASIDEAYVDLTSAVQERLQKLQGQPISADL | |
| | LPSTYIEGLPQGPTTAEETVQKEGMRKQGLFQWLDSLQIDNLTSPDLQL | |
| | TVGAVIVEEMRAAIERETGFQCSAGISHNKVLAKLACGLNKPNRQTLV | |
| | SHGSVPQLFSQMPIRKIRSLGGKLGASVIEILGIEYMGELTQFTESQLQSH | |
| | FGEKNGSWLYAMCRGIEHDPVKPRQLPKTIGCSKNFPGKTALATREQV | |
| | QWWLLQLAQELEERLTKDRNDNDRVATQLVVSIRVQGDKRLSSLRRC | |
| | CALTRYDAHKMSHDAFTVIKNCNTSGIQTEWSPPLTMLFLCATKFSAS | |
| | APSSSTDITSFLSSDPSSLPKVPVTSSEAKTQGSGPAVTATKKATTSLESF | |
| | FQKAAERQKVKEASLSSLTAPTQAPMSNSPSKPSLPFQTSQSTGTEPFFK | |
| | QKSLLLKQKQLNNSSVSSPQQNPWSNCKALPNSLPTEYPGCVPVCEGV | |
| | SKLEESSKATPAEMDLAHNSQSMHASSASKSVLEVTQKATPNPSLLAA | |
| | EDQVPCEKCGSLVPVWDMPEHMDYHFALELQKSFLQPHSSNPQVVSA | |
| | VSHQGKRNPKSPLACTNKRPRPEGMQTLESFFKPLTH | |
| PolI | MEKLGVEPEEEGGGDDDEEDAEAWAMELADVGAAASSQGVHDQVLP | 740 |
| | TPNASSRVIVHVDLDCFYAQVEMISNPELKDKPLGVQQKYLVVTCNYE | |
| | ARKLGVKKLMNVRDAKEKCPQLVLVNGEDLTRYREMSYKVTELLEEF | |
| | SPVVERLGFDENFVDLTEMVEKRLQQLQSDELSAVTVSGHVYNNQSIN | |
| | LLDVLHIRLLVGSQIAAEMREAMYNQLGLTGCAGVASNKLLAKLVSG | |
| | VFKPNQQTVLLPESCQHLIHSLNHIKEIPGIGYKTAKCLEALGINSVRDL | |
| | QTFSPKILEKELGISVAQRIQKLSFGEDNSPVILSGPPQSFSEEDSFKKCSS | |
| | EVEAKNKIEELLASLLNRVCQDGRKPHTVRLIIRRYSSEKHYGRESRQC | |
| | PIPSHVIQKLGTGNYDVMTPMVDILMKLFRNMVNVKMPFHLTLLSVCF | |
| | CNLKALNTAKKGLIDYYLMPSLSTTSRSGKHSFKMKDTHMEDFPKDKE | |
| | TNRDFLPSGRIESTRTRESPLDTTNFSKEKDINEFPLCSLPEGVDQEVFKQ | |
| | LPVDIQEEILSGKSREKFQGKGSVSCPLHASRGVLSFFSKKQMQDIPINP | |
| | RDHLSSSKQVSSVSPCEPGTSGFNSSSSSYMSSQKDYSYYLDNRLKDER | |
| | ISQGPKEPQGFHFTNSNPAVSAFHSFPNLQSEQLFSRNHTTDSHKQTVA | |
| | TDSHEGLTENREPDSVDEKITFPSDIDPQVFYELPEAVQKELLAEWKRA | |
| | GSDFHIGHK | |
| PolK | MDSTKEKCDSYKDDLLLRMGLNDNKAGMEGLDKEKINKIIMEATKGS | 741 |
| | RFYGNELKKEKQVNQRIENMMQQKAQITSQQLRKAQLQVDRFAMELE | |
| | QSRNLSNTIVHIDMDAFYAAVEMRDNPELKDKPIAVGSMSMLSTSNYH | |
| | ARRFGVRAAMPGFIAKRLCPQLIIVPPNFDKYRAVSKEVKEILADYDPN | |
| | FMAMSLDEAYLNITKHLEERQNWPEDKRRYFIKMGSSVENDNPGKEV | |
| | NKLSEHERSISPLLFEESPSDVQPPGDPFQVNFEEQNNPQILQNSVVFGTS | |
| | AQEVVKEIRFRIEQKTTLTASAGIAPNTMLAKVCSDKNKPNGQYQILPN | |
| | RQAVMDFIKDLPIRKVSGIGKVTEKMLKALGIITCTELYQQRALLSLLES | |
| | ETSWHYFLHISLGLGSTHLTRDGERKSMSVERTFSEINKAEEQYSLCQE | |
| | LCSELAQDLQKERLKGRTVTIKLKNVNFEVKTRASTVSSVVSTAEEIFAI | |
| | AKELLKTEIDADFPHPLRLRLMGVRISSFPNEEDRKHQQRSIIGFLQAGN | |
| | QALSATECTLEKTDKDKFVKPLEMSHKKSFFDKKRSERKWSHQDTFKC | |
| | EAVNKQSFQTSQPFQVLKKKMNENLEISENSDDCQILTCPVCFRAQGCI | |
| | SLEALNKHVDECLDGPSISENFKMFSCSHVSATKVNKKENVPASSLCEK | |
| | QDYEAHPKIKEISSVDCIALVDTIDNSSKAESIDALSNKHSKEECSSLPSK | |
| | SFNIEHCHQNSSSTVSLENEDVGSFRQEYRQPYLCEVKTGQALVCPVCN | |
| | VEQKTSDLTLFNVHVDVCLNKSFIQELRKDKFNPVNQPKESSRSTGSSS | |
| | GVQKAVTRTKRPGLMTKYSTSKKIKPNNPKHTLDIFFK | |
| REV1 | MRRGGWRKRAENDGWETWGGYMAAKVQKLEEQFRSDAAMQKDGT | 742 |
| | SSTIFSGVAIYVNGYTDPSAEELRKLMMLHGGQYHVYYSRSKTTHIIAT | |
| | NLPNAKIKELKGEKVIRPEWIVESIKAGRLLSYIPYQLYTKQSSVQKGLS | |
| | FNPVCRPEDPLPGPSNIAKQLNNRVNHIVKKIETENEVKVNGMNSWNE | |
| | EDENNDFSFVDLEQTSPGRKQNGIPHPRGSTAIFNGHTPSSNGALKTQD | |
| | CLVPMVNSVASRLSPAFSQEEDKAEKSSTDFRDCTLQQLQQSTRNTDA | |
| | LRNPHRTNSFSLSPLHSNTKINGAHHSTVQGPSSTKSTSSVSTFSKAAPS | |
| | VPSKPSDCNFISNFYSHSRLHHISMWKCELTEFVNTLQRQSNGIFPGREK | |
| | LKKMKTGRSALVVTDTGDMSVLNSPRHQSCIMHVDMDCFFVSVGIRN | |
| | RPDLKGKPVAVTSNRGTGRAPLRPGANPQLEWQYYQNKILKGKAADIP | |
| | DSSLWENPDSAQANGIDSVLSRAEIASCSYEARQLGIKNGMFFGHAKQ | |
| | LCPNLQAVPYDFHAYKEVAQTLYETLASYTHNIEAVSCDEALVDITEIL | |
| | AETKLTPDEFANAVRMEIKDQTKCAASVGIGSNILLARMATRKAKPDG | |
| | QYHLKPEEVDDFIRGQLVTNLPGVGHSMESKLASLGIKTCGDLQYMTM | |
| | AKLQKEFGPKTGQMLYRFCRGLDDRPVRTEKERKSVSAEINYGIRFTQP | |
| | KEAEAFLLSLSEEIQRRLEATGMKGKRLTLKIMVRKPGAPVETAKFGG | |
| | HGICDNIARTVTLDQATDNAKIIGKAMLNMFHTMKLNISDMRGVGIHV | |
| | NQLVPTNLNPSTCPSRPSVQSSHFPSGSYSVRDVFQVQKAKKSTEEEHK | |
| | EVFRAAVDLEISSASRTCTFLPPFPAHLPTSPDTNKAESSGKWNGLHTPV | |
| | SVQSRLNLSIEVPSPSQLDQSVLEALPPDLREQVEQVCAVQQAESHGDK | |
| | KKEPVNGCNTGILPQPVGTVLLQIPEPQESNSDAGINLIALPAFSQVDPE | |
| | VFAALPAELQRELKAAYDQRQRQGENSTHQQSASASVPKNPLLHLKA | |
| | AVKEKKRNKKKKTIGSPKRIQSPLNNKLLNSPAKTLPGACGSPQKLIDG | |
| | FLKHEGPPAEKPLEELSASTSGVPGLSSLQSDPAGCVRPPAPNLAGAVE | |
| | FNDVKTLLREWITTISDPMEEDILQVVKYCTDLIEEKDLEKLDLVIKYM | |
| | KRLMQQSVESVWNMAFDFILDNVQVVLQQTYGSTLKVT | |
| REV3L (catalytic | MGLSPLSTEPKTQKLSNKKGSNTDTLRRVLLTQAKNQFAAVNTPQKET | 743 |
| domain) | SQIDGPSLNNTYGFKVSIQNLQEAKALHEIQNLTLISVELHARTRRDLEP | |
| | DPEFDPICALFYCISSDTPLPDTEKTELTGVIVIDKDKTVFSQDIRYQTPL | |
| | LIRSGITGLEVTYAADEKALFHEIANIIKRYDPDILLGYEIQMHSWGYLL | |
| | QRAAALSIDLCRMISRVPDDKIENRFAAERDEYGSYTMSEINIVGRITLN | |
| | LWRIMRNEVALTNYTFENVSFHVLHQRFPLFTFRVLSDWFDNKTDLYR | |
| | WKMVDHYVSRVRGNLQMLEQLDLIGKTSEMARLFGIQFLHVLTRGSQ | |
| | YRVESMMLRIAKPMNYIPVTPSVQQRSQMRAPQCVPLIMEPESRFYSNS | |
| | VLVLDFQSLYPSIVIAYNYCFSTCLGHVENLGKYDEFKFGCTSLRVPPD | |
| | LLYQVRHDITVSPNGVAFVKPSVRKGVLPRMLEEILKTRFMVKQSMKA | |
| | YKQDRALSRMLDARQLGLKLIANVTFGYTSANFSGRMPCIEVGDSIVH | |
| | KARETLERAIKLVNDTKKWGARVVYGDTDSMFVLLKGATKEQSFKIG | |
| | QEIAEAVTATNPKPVKLKFEKVYLPCVLQTKKRYVGYMYETLDQKDP | |
| | VFDAKGIETVRRDSCPAVSKILERSLKLLFETRDISLIKQYVQRQCMKLL | |
| | EGKASIQDFIFAKEYRGSFSYKPGACVPALELTRKMLTYDRRSEPQVGE | |
| | RVPYVIIYGTPGVPLIQLVRRPVEVLQDPTLRLNATYYITKQILPPLARIF | |
| | SLIGIDVFSWYHELPRIHKATSSSRSEPEGRKGTISQYFTTLHCPVCDDLT | |
| | QHGICSKCRSQPQHVAVILNQEIRELERQQEQLVKICKNCTGCFDRHIPC | |
| | VSLNCPVLFKLSRVNRELSKAPYLRQLLDQF | |
| POlN | MENYEALVGFDLCNTPLSSVAQKIMSAMHSGDLVDSKTWGKSTETME | 744 |
| | VINKSSVKYSVQLEDRKTQSPEKKDLKSLRSQTSRGSAKLSPQSFSVRL | |
| | TDQLSADQKQKSISSLTLSSCLIPQYNQEASVLQKKGHKRKHFLMENIN | |
| | NENKGSINLKRKHITYNNLSEKTSKQMALEEDTDDAEGYLNSGNSGAL | |
| | KKHFCDIRHLDDWAKSQLIEMLKQAAALVITVMYTDGSTQLGADQTP | |
| | VSSVRGIVVLVKRQAEGGHGCPDAPACGPVLEGFVSDDPCIYIQIEHSAI | |
| | WDQEQEAHQQFARNVLFQTMKCKCPVICFNAKDFVRIVLQFFGNDGS | |
| | WKHVADFIGLDPRIAAWLIDPSDATPSFEDLVEKYCEKSITVKVNSTYG | |
| | NSSRNIVNQNVRENLKTLYRLTMDLCSKLKDYGLWQLFRTLELPLIPIL | |
| | AVMESHAIQVNKEEMEKTSALLGARLKELEQEAHFVAGERFLITSNNQ | |
| | LREILFGKLKLHLLSQRNSLPRTGLQKYPSTSEAVLNALRDLHPLPKIILE | |
| | YRQVHKIKSTFVDGLLACMKKGSISSTWNQTGTVTGRLSAKHPNIQGIS | |
| | KHPIQITTPKNFKGKEDKILTISPRAMFVSSKGHTFLAADFSQIELRILTH | |
| | LSGDPELLKLFQESERDDVFSTLTSQWKDVPVEQVTHADREQTKKVVY | |
| | AVVYGAGKERLAACLGVPIQEAAQFLESFLQKYKKIKDFARAAIAQCH | |
| | QTGCVVSIMGRRRPLPRIHAHDQQLRAQAERQAVNFVVQGSAADLCK | |
| | LAMIHVFTAVAASHTLTARLVAQIHDELLFEVEDPQIPECAALVRRTME | |
| | SLEQVQALELQLQVPLKVSLSAGRSWGHLVPLQEAWGPPPGPCRTESP | |
| | SNSLAAPGSPASTQPPPLHFSPSFCL | |
| PolL | MDPRGILKAFPKRQKIHADASSKVLAKIPRREEGEEAEEWLSSLRAHVV | 745 |
| | RTGIGRARAELFEKQIVQHGGQLCPAQGPGVTHIVVDEGMDYERALRL | |
| | LRLPQLPPGAQLVKSAWLSLCLQERRLVDVAGFSIFIPSRYLDHPQPSK | |
| | AEQDASIPPGTHEALLQTALSPPPPPTRPVSPPQKAKEAPNTQAQPISDD | |
| | EASDGEETQVSAADLEALISGHYPTSLEGDCEPSPAPAVLDKWVCAQPS | |
| | SQKATNHNLHITEKLEVLAKAYSVQGDKWRALGYAKAINALKSFHKP | |
| | VTSYQEACSIPGIGKRMAEKIIEILESGHLRKLDHISESVPVLELFSNIWG | |
| | AGTKTAQMWYQQGFRSLEDIRSQASLTTQQAIGLKHYSDFLERMPREE | |
| | ATEIEQTVQKAAQAFNSGLLCVACGSYRRGKATCGDVDVLITHPDGRS | |
| | HRGIFSRLLDSLRQEGFLTDDLVSQEENGQQQKYLGVCRLPGPGRRHR | |
| | RLDIIVVPYSEFACALLYFTGSAHFNRSMRALAKTKGMSLSEHALSTAV | |
| | VRNTHGCKVGPGRVLPTPTEKDVFRLLGLPYREPAERDW | |
| PolI 3M | MVQIPQNPLILVDGSSYLYRAYHAFPPLTNSAGEPTGAMYGVLNMLRS | 746 |
| | LIMQYKPTHAAVVFDAKGKTFRDELFEHYKSHRPPMPDDLRAQIEPLH | |
| | AMVKAMGLPLLAVSGVEADDVIGTLAREAEKAGRPVLISTGDKDMAQ | |
| | LVTPNITLINTMTNTILGPEEVVNKYGVPPELIIDFLALMGDSSDNIPGVP | |
| | GVGEKTAQALLQGLGGLDTLYAEPEKIAGLSFRGAKTMAAKLEQNKE | |
| | VAYLSYQLATIKTDVELELTCEQLEVQQPAAEELLGLFKKYEFKRWTA | |
| | DVEAGKWLQAKGAKPAAKPQETSVADEAPEVTATVISYDNYVTILDEE | |
| | TLKAWIAKLEKAPVFAFDTETDSLDNISANLVGLSFAIEPGVAAYIPVA | |
| | HDYLDAPDQISRERALELLKPLLEDEKALKVGQNLKYDRGILANYGIEL | |
| | RGIAFDTMLESYILNSVAGRHDMDSLAERWLKHKTITFEEIAGKGKNQ | |
| | LTFNQIALEEAGRYAAEDADVTLQLHLKMWPDLQKHKGPLNVFENIE | |
| | MPLVPVLSRIERNGVKIDPKVLHNHSEELTLRLAELEKKAHEIAGEEFN | |
| | LSSTKQLQTILFEKQGIKPLKKTPGGAPSTSEEVLEELALDYPLPKVILEY | |
| | RGLAKLKSTYTDKLPLMINPKTGRVHTSYHQAVTATGRLSSTDPNLQN | |
| | IPVRNEEGRRIRQAFIAPEDYVIVSADYSQIELRIMAHLSRDKGLLTAFA | |
| | EGKDIHRATAAEVFGLPLETVTSEQRRSAKAINFGLIYGMSAFGLARQL | |
| | NIPRKEAQKYMDLYFERYPGVLEYMERTRAQAKEQGYVETLDGRRLY | |
| | LPDIKSSNGARRAAAERAAINAPMQGTAADIIKRAMIAVDAWLQAEQP | |
| | RVRMIMQVHDELVFEVHKDDVDAVAKQIHQLMENCTRLDVPLLVEV | |
| | GSGENWDQAH | |

### REFERENCES FOR EXAMPLE 7

[0684] 1. Landrum, M. J. et al. ClinVar: public archive of interpretations of clinically relevant variants. Nucleic Acids Res 44, D862-D868 (2016).
[0685] 2. Komor, A. C., Kim, Y. B., Packer, M. S., Zuris, J. A. & Liu, D. R. Programmable editing of a target base in genomic DNA without double-stranded DNA cleavage. Nature 533, 420-424 (2016).
[0686] 3. Gaudelli, N. M. et al. Programmable base editing of A•T to G•C in genomic DNA without DNA cleavage. Nature 551, 464-471 (2017).
[0687] 4. Gehrke, J. M. et al. An APOBEC3A-Cas9 base editor with minimized bystander and off-target activities. Nature Biotechnology 36, 977-982 (2018).
[0688] 5. Nishida, K. et al. Targeted nucleotide editing using hybrid prokaryotic and vertebrate adaptive immune systems. Science 353, aaf8729-aaf8729 (2016).
[0689] 6. Richter, M. F. et al. Phage-assisted evolution of an adenine base editor with improved Cas domain compatibility and activity. Nature Biotechnology 38, 883-891 (2020).
[0690] 7. Rees, H. A. & Liu, D. R. Base editing: precision chemistry on the genome and transcriptome of living cells. Nature Reviews Genetics 19, 770-788 (2018).
[0691] 8. Anzalone, A. V., Koblan, L. W. & Liu, D. R. Genome editing with CRISPR-Cas nucleases, base editors, transposases and prime editors. Nature Biotechnology 38, 824-844 (2020).
[0692] 9. Gaudelli, N. M. et al. Directed evolution of adenine base editors with increased activity and therapeutic application. Nature Biotechnology 38, 892-900 (2020).
[0693] 10. Mok, B. Y. et al. A bacterial cytidine deaminase toxin enables CRISPR-free mitochondrial base editing. Nature 583, 631-637 (2020).
[0694] 11. Komor, A. C. et al. Improved base excision repair inhibition and bacteriophage Mu Gam protein yields C:G-to-T:A base editors with higher efficiency and product purity.
[0695] Science Advances 3, eaao4774 (2017).
[0696] 12. Arbab, M. et al. Determinants of Base Editing Outcomes from Target Library Analysis and Machine Learning. Cell 182, 463-480.e430 (2020).
[0697] 13. Kurt, I. C. et al. CRISPR C-to-G base editors for inducing targeted DNA transversions in human cells. Nature Biotechnology 39, 41-46 (2020).
[0698] 14. Zhao, D. et al. Glycosylase base editors enable C-to-A and C-to-G base changes. Nature Biotechnology 39, 35-40 (2020).
[0699] 15. Chen, L. et al. Programmable C:G to G:C genome editing with CRISPR-Cas9-directed base excision repair proteins. Nature Communications 12 (2021).
[0700] 16. Liu, D. R. & Koblan, L. W. Cytosine to Guanine Base Editor. World Intellectual Property Organization (2018).
[0701] 17. Marquart, K. F. et al. Predicting base editing outcomes with an attention-based deep learning algorithm trained on high-throughput target library screens. bioRxiv (2020).
[0702] 18. Sang, P. B., Srinath, T., Patil, A. G., Woo, E.-J. & Varshney, U. A unique uracil-DNA binding protein of the uracil DNA glycosylase superfamily. Nucleic Acids Res 43, 8452-8463 (2015).
[0703] 19. Ahn, W.-C. et al. Covalent binding of uracil DNA glycosylase UdgX to abasic DNA upon uracil excision. Nat Chem Biol 15, 607-614 (2019).
[0704] 20. Tu, J., Chen, R., Yang, Y., Cao, W. & Xie, W. Suicide inactivation of the uracil DNA glycosylase UdgX by covalent complex formation. Nat Chem Biol 15, 615-622 (2019).
[0705] 21. Gilbert, L. A. et al. CRISPR-mediated modular RNA-guided regulation of transcription in eukaryotes. Cell 154, 442-451 (2013).
[0706] 22. Gallina, I., Hendriks, I. A., Hoffmann, S., Larsen, N. B., Johansen, J., Colding-Christensen, C. S., Schubert, L., Sellés-Baiget, S., Fábián, Z., Kühbacher, U., Gao, A. O., Räschle, M., Rasmussen, S., Nielsen, M. L., Mailand, N., Duxin, J. P. The ubiquitin ligase RFWD3 is required for translesion DNA synthesis. Molecular Cell 81, 1-17 (2020).
[0707] 23. Levy, J. M. et al. Cytosine and adenine base editing of the brain, liver, retina, heart and skeletal muscle of mice via adeno-associated viruses. Nat Biomed Eng 4, 97-110 (2020).
[0708] 24. Kim, Y. B. et al. Increasing the genome-targeting scope and precision of base editing with engineered Cas9-cytidine deaminase fusions. Nature Biotechnology 35, 371-376 (2017).
[0709] 25. Kleinstiver, B. P. et al. High-fidelity CRISPR-Cas9 nucleases with no detectable genome-wide off-target effects. Nature 529, 490-495 (2016).
[0710] 26. Slaymaker, I. M. et al. Rationally engineered Cas9 nucleases with improved specificity. Science 351, 84-88 (2015).
[0711] 27. Chen, J. S. et al. Enhanced proofreading governs CRISPR-Cas9 targeting accuracy. Nature 550, 407-410 (2017).
[0712] 28. Lee, J. K. et al. Directed evolution of CRISPR-Cas9 to increase its specificity. Nature Communications 9, 3048 (2018).
[0713] 29. Koblan, L. W. et al. Improving cytidine and adenine base editors by expression optimization and ancestral reconstruction. Nature Biotechnology 36, 843-846 (2018).
[0714] 30. Shen, M. W. et al. Predictable and precise template-free CRISPR editing of pathogenic variants. Nature 563, 646-651 (2018).
[0715] 31. Nishimasu, H. et al. Engineered CRISPR-Cas9 nuclease with expanded targeting space. Science 361, 1259-1262 (2018).
[0716] 32. Stenson, P. D. et al. Human Gene Mutation Database: towards a comprehensive central mutation database. Journal of Medical Genetics 45, 124-126 (2007).
[0717] 33. Frank, M. et al. The type of variants at the COL3A1 gene associates with the phenotype and severity of vascular Ehlers-Danlos syndrome. European Journal of Human Genetics 23, 1657-1664 (2015).
[0718] 34. Petrucelli, N., Daly, M. B. & Feldman, G. L. Hereditary breast and ovarian cancer due to mutations in BRCA1 and BRCA2. Genetics in Medicine 12, 245-259 (2010).
[0719] 35. Douglas, J. et al. NSD1 mutations are the major cause of Sotos syndrome and occur in some cases of Weaver syndrome but are rare in other overgrowth phenotypes. American journal of human genetics 72, 132-143 (2003).
[0720] 36. Luna-Pelaez, N. et al. The Cornelia de Lange Syndrome-associated factor NIPBL interacts with BRD4 ET domain for transcription control of a common set of genes.
[0721] Cell Death Dis 10 (2019).
[0722] 37. Anzalone, A. V. et al. Search-and-replace genome editing without double-strand breaks or donor DNA. Nature 576, 149-157 (2019).
[0723] 38. Sancar, A. DNA Excision Repair. Annual Review of Biochemistry 65, 43-81 (1996).
[0724] 39. Wood, R. D. DNA Repair in Eukaryotes. Annual Review of Biochemistry 65, 135-167 (1996).
[0725] 40. Modrich, P. & Lahue, R. Mismatch Repair in Replication Fidelity, Genetic Recombination, and Cancer Biology. Annual Review of Biochemistry 65, 101-133 (1996).
[0726] 41. Choi, J.-Y., Lim, S., Kim, E.-J., Jo, A. & Guengerich, F. P. Translesion Synthesis across Abasic Lesions by Human B-Family and Y-Family DNA Polymerases a, 6, f, 1, x, and REV1. Journal of Molecular Biology 404, 34-44 (2010).
[0727] 42. Lin, W. et al. The human REV1 gene codes for a DNA template-dependent dCMP transferase. Nucleic Acids Res 27, 4468-4475 (1999).
[0728] 43. Prindle, M. J. & and molecular, L.-L. A. DNA polymerase delta in DNA replication and genome maintenance. Environmental and molecular mutagenesis 53, 666-682 (2012).
[0729] 44. Rees, H. A. et al. Improving the DNA specificity and applicability of base editing through protein engineering and protein delivery. Nature Communications 8, 15790 (2017).
[0730] 45. Clement, K. et al. CRISPResso2 provides accurate and rapid genome editing sequence analysis. Nature Biotechnology 37, 224-226 (2019).
[0731] 46. Horlbeck, M. A. et al. Compact and highly active next-generation libraries for CRISPR-mediated gene repression and activation. eLife 5 (2016).
[0732] 47. Gilbert, Luke A. et al. Genome-Scale CRISPR-Mediated Control of Gene Repression and Activation. Cell 159, 647-661 (2014).
[0733] 48. Sherwood, R. I. et al. Discovery of directional and nondirectional pioneer transcription factors by modeling DNase profile magnitude and shape. Nature Biotechnology 32, 171-178 (2014).
[0734] 49. Paszke, A., Gross, S., Massa, F. & in neural . . . , L.-A. Pytorch: An imperative style, high-performance deep learning library. Advances in neural . . . (2019).
[0735] 50. Jinek, M. et al. RNA-programmed genome editing in human cells. eLife 2, e00471 (2013).
[0736] 51. Jinek, M. et al. A Programmable Dual-RNA-Guided DNA Endonuclease in Adaptive Bacterial Immunity. Science 337, 816-821 (2012).
[0737] 52. Gasiunas, G., Barrangou, R., Horvath, P. & Siksnys, V. Cas9-crRNA ribonucleoprotein complex mediates specific DNA cleavage for adaptive immunity in bacteria. PNAS 109, E2579-E2586 (2012).
[0738] 53. Mali, P. et al. RNA-Guided Human Genome Engineering via Cas9. Science 339, 823-826 (2013).
[0739] 54. Cong, L. et al. Multiplex Genome Engineering Using CRISPR/Cas Systems. Science 339, 819-823 (2013).
[0740] 55. Camps, M., Naukkarinen, J., Johnson, B. P. & Loeb, L. A. Targeted gene evolution in Escherichia coli using a highly error-prone DNA polymerase I. PNAS 100, 9727-9732 (2003).

### EQUIVALENTS AND SCOPE

[0741] Those skilled in the art will recognize, or be able to ascertain using no more than routine experimentation, many equivalents to the specific embodiments of the invention described herein. The scope of the present invention is not intended to be limited to the above description, but rather is as set forth in the appended claims.

[0742] In the claims articles such as “a,” “an,” and “the” may mean one or more than one unless indicated to the contrary or otherwise evident from the context. Claims or descriptions that include “or” between one or more members of a group are considered satisfied if one, more than one, or all of the group members are present in, employed in, or otherwise relevant to a given product or process unless indicated to the contrary or otherwise evident from the context. The invention includes embodiments in which exactly one member of the group is present in, employed in, or otherwise relevant to a given product or process. The invention also includes embodiments in which more than one, or all of the group members are present in, employed in, or otherwise relevant to a given product or process.

[0743] Furthermore, it is to be understood that the invention encompasses all variations, combinations, and permutations in which one or more limitations, elements, clauses, descriptive terms, etc., from one or more of the claims or from relevant portions of the description is introduced into another claim. For example, any claim that is dependent on another claim can be modified to include one or more limitations found in any other claim that is dependent on the same base claim. Furthermore, where the claims recite a composition, it is to be understood that methods of using the composition for any of the purposes disclosed herein are included, and methods of making the composition according to any of the methods of making disclosed herein or other methods known in the art are included, unless otherwise indicated or unless it would be evident to one of ordinary skill in the art that a contradiction or inconsistency would arise.

[0744] Where elements are presented as lists, e.g., in Markush group format, it is to be understood that each subgroup of the elements is also disclosed, and any element(s) can be removed from the group. It is also noted that the term “comprising” is intended to be open and permits the inclusion of additional elements or steps. It should be understood that, in general, where the invention, or aspects of the invention, is/are referred to as comprising particular elements, features, steps, etc., certain embodiments of the invention or aspects of the invention consist, or consist essentially of, such elements, features, steps, etc. For purposes of simplicity those embodiments have not been specifically set forth in haec verba herein. Thus for each embodiment of the invention that comprises one or more elements, features, steps, etc., the invention also provides embodiments that consist or consist essentially of those elements, features, steps, etc.

[0745] Where ranges are given, endpoints are included. Furthermore, it is to be understood that unless otherwise indicated or otherwise evident from the context and/or the understanding of one of ordinary skill in the art, values that are expressed as ranges can assume any specific value within the stated ranges in different embodiments of the invention, to the tenth of the unit of the lower limit of the range, unless the context clearly dictates otherwise. It is also to be understood that unless otherwise indicated or otherwise evident from the context and/or the understanding of one of ordinary skill in the art, values expressed as ranges can assume any subrange within the given range, wherein the endpoints of the subrange are expressed to the same degree of accuracy as the tenth of the unit of the lower limit of the range.

[0746] In addition, it is to be understood that any particular embodiment of the present invention may be explicitly excluded from any one or more of the claims. Where ranges are given, any value within the range may explicitly be excluded from any one or more of the claims. Any embodiment, element, feature, application, or aspect of the compositions and/or methods of the invention, can be excluded from any one or more claims. For purposes of brevity, all of the embodiments in which one or more elements, features, purposes, or aspects is excluded are not set forth explicitly herein.

[0747] All publications, patents and sequence database entries mentioned herein, including those items listed above, are hereby incorporated by reference in their entirety as if each individual publication or patent was specifically and individually indicated to be incorporated by reference. In case of conflict, the present application, including any definitions herein, will control.

What is claimed is:

1. A fusion protein comprising (i) a nucleic acid programmable DNA binding protein (napDNAbp) domain, (ii) a cytidine deaminase domain, (iii) a first uracil binding protein (UBP) domain, and (iv) a DNA repair protein.

2. The fusion protein of claim 1, wherein the DNA repair protein is selected from a DNA polymerase, an exonuclease, an RNA binding motif protein, an E3 ligase, and a translesion polymerase.

3. The fusion protein of claim 2, wherein the DNA polymerase is selected from DNA polymerase D1 (POLD1), DNA polymerase D2 (POLD2), and DNA polymerase D3 (POLD3).

4. The fusion protein of claim 2, wherein the RNA binding motif protein is X-linked (RBMX).

5. The fusion protein of claim 2, wherein the exonuclease is EX01.

6. The fusion protein of claim 2, wherein the E3 ligase is RAD18 or RFWD3.

7. The fusion protein of claim 1 or 2, wherein the DNA repair protein is encoded by a gene selected from DDX1, EXO1, POLD1, POLD2, POLD3, RAD18, RBMX, REV1, RFWD3, TIMELESS, PCNA, POLH, POLK, UBE2I, and UBE2T.

8. The fusion protein of any one of claims 1-4 and 7, wherein the DNA repair protein is selected from POLD2, RBMX, and EXO1.

9. The fusion protein of any one of claims 1-8, wherein the first UBP domain is a UNG orthologue from Mycobacterium smegmatis (UdgX) protein, or a variant thereof.

10. The fusion protein of any one of claims 1-9, wherein the first UBP domain is a UdgX protein comprising an amino acid sequence that is at least 80%, 85%, 90%, 95%, 98%, or 99% identical to the amino acid sequence of SEQ ID NO: 49 (UdgX).

11. The fusion protein of any one of claims 1-10, wherein the first UBP domain comprises the amino acid sequence of SEQ ID NO: 49.

12. The fusion protein of any one of claims 1-10, wherein the first UBP domain comprises the amino acid sequence of SEQ ID NO: 50 (UdgX*).

13. A fusion protein comprising (i) a nucleic acid programmable DNA binding protein (napDNAbp) domain, (ii) a cytidine deaminase domain, (iii) a first UBP domain, and (iv) a second UBP domain.

14. The fusion protein of claim 13 further comprising a third UBP domain.

15. The fusion protein of claim 13 or 14, wherein the first and second UBP domains each comprise a UdgX protein, or a variant thereof.

16. The fusion protein of claim 14, wherein the third UBP domain comprises a UdgX protein, or a variant thereof.

17. The fusion protein of claim 15 or 16, wherein any of the UdgX proteins comprises an amino acid sequence that is at least 80%, 85%, 90%, 95%, 98%, or 99% identical to the amino acid sequence of SEQ ID NO: 49.

18. The fusion protein of any one of claims 15-17, wherein any of the UdgX proteins comprises the amino acid sequence of SEQ ID NO: 49.

19. The fusion protein of any one of claims 1-18, wherein the cytidine deaminase domain is a deaminase from the apolipoprotein B mRNA-editing complex (APOBEC) family.

20. The fusion protein of any one of claims 1-19, wherein the cytidine deaminase domain comprises an amino acid sequence that is at least 85% identical to an amino acid sequence of any one of SEQ ID NOs: 67-101 and 695-702.

21. The fusion protein of any one of claims 1-20, wherein the cytidine deaminase domain comprises an amino acid sequence of any one of SEQ ID NOs: 67-101 and 695-702.

22. The fusion protein of any one of claims 1-21, wherein the cytidine deaminase domain is a rat APOBEC1 (rAPOBEC1) deaminase.

23. The fusion protein of any one of claims 1-22, wherein the cytidine deaminase domain is a rat APOBEC1 (rAPOBEC1) deaminase comprising one or more mutations selected from the group consisting of W90Y, R126E, and R132E of SEQ ID NO: 93, or one or more corresponding mutations in another APOBEC deaminase.

24. The fusion protein of any one of claims 1-23, wherein the cytidine deaminase domain is selected from EE (SEQ ID NO: 696), YE1 (SEQ ID NO: 697), YE2 (SEQ ID NO: 698), and YEE (SEQ ID NO: 699).

25. The fusion protein of any one of claims 1-22, wherein the cytidine deaminase is an ancestral 689 (Anc689) deaminase.

26. The fusion protein of any one of claims 1-21, wherein the cytidine deaminase domain is a rat APOBEC3A (e3A) deaminase.

27. The fusion protein of any one of claims 1-21 and 26, wherein the cytidine deaminase domain is a rat APOBEC3A (e3A) deaminase comprising a T31A mutation in SEQ ID NO: 93, or one or more corresponding mutations in another APOBEC deaminase.

28. The fusion protein of any one of claims 1-27, wherein the napDNAbp domain comprises a Cas9 domain.

29. The fusion protein of claim 28, wherein the Cas9 domain comprises an amino acid sequence that is at least 85%, 90%, 92.5%, 95%, 97%, 98%, or 99% identical to any one of SEQ ID NOs: 4-26, 726-736.

30. The fusion protein of claim 28 or 29, wherein the Cas9 domain comprises the amino acid sequence of any one of SEQ ID NOs: 4-26, 724-736.

31. The fusion protein of any one of claims 28-30, wherein the Cas9 domain is a Cas9 nickase (nCas9).

32. The fusion protein of claim 31, wherein the Cas9 nickase (nCas9) comprises an amino acid sequence that is at least 85% identical to any one of SEQ ID NOs: 10, 13, 16, 20, 21, 725, 739, 731, 732, 736, 735, and 728.

33. The fusion protein of claim 31 or 32, wherein the nCas9 comprises the amino acid sequence of any one of SEQ ID NOs: 10, 13, 16, 20, 21, 725, 739, 731, 732, 736, 735, and 728.

34. The fusion protein of any one of claims 28-33, wherein the Cas9 domain is selected from an nCas9-NG, a HypaCas9, a Hypa-nCas9, an HF-nCas9-NG, a Sniper-nCas9, an HF-Hypa-nCas9, an e-Cas9, an e-HF-Hypa-nCas9, and an e-Hypa-Cas9.

35. The fusion protein of any one of claims 28-34, wherein the Cas9 domain is an nCas9-NG, a high fidelity Cas9-NG (HF-nCas9-NG), or a Hypa-nCas9.

36. The fusion protein of any one of claims 28-30, wherein the Cas9 domain is a nuclease inactive Cas9 (dCas9).

37. The fusion protein of any one of claims 1-36, wherein the fusion protein comprises the structure [cytidine deaminase domain]-[first UBP domain]-[napDNAbp domain], wherein each instance of “]-[” comprises an optional linker.

38. The fusion protein of any one of claims 1-37, wherein the cytidine deaminase and the first UBP domain, and/or the first UBP domain and the napDNAbp domain, are fused via a linker.

39. The fusion protein of claim 38, wherein the cytidine deaminase and the first UBP domain, and/or the first UBP domain and the napDNAbp domain, are fused via a linker comprising the amino acid sequence of any one of SEQ ID NOs: 102-109 and 441.

40. The fusion protein of any one of claims 1-39, wherein the fusion protein comprises the structure [cytidine deaminase domain]-[UdgX protein]-[Cas9 nickase], wherein each instance of “]-[” comprises an optional linker.

41. The fusion protein of any one of claims 1-12 and 19-40 further comprising a second DNA repair protein.

42. The fusion protein of claim 41, wherein the second DNA repair protein is selected from POLD2, RBMX, and EXO1.

43. The fusion protein of claim 41 or 42, wherein the first DNA repair protein is a POLD2 and the second DNA repair protein is an RBMX.

44. The fusion protein of any one of claims 1-43, wherein the fusion protein comprises the structure:
NH₂-[second UBP domain]-[cytidine deaminase domain]-[first UBP domain]-[napDNAbp domain]-COOH;
NH₂-[second UBP domain]-[cytidine deaminase domain]-[first UBP domain]-[napDNAbp domain]-[DNA repair protein]-COOH;
NH₂-[DNA repair protein]-[cytidine deaminase domain]-[first UBP domain]-[napDNAbp domain]-COOH;
NH₂-[second UBP domain]-[cytidine deaminase domain]-[first UBP domain]-[napDNAbp domain]-[third UBP domain]-COOH;
NH₂-[DNA repair protein]-[cytidine deaminase domain]-[first UBP domain]-[napDNAbp domain]-[second UBP domain]-COOH; and
NH₂-[DNA repair protein]-[cytidine deaminase domain]-[first UBP domain]-[napDNAbp domain]-[second DNA repair protein]-COOH;
wherein each instance of “]-[” comprises an optional linker.

45. The fusion protein of claim 44, wherein the second UBP domain and the cytidine deaminase domain are fused via a linker comprising the amino acid sequence of any one of SEQ ID NOs: 102-109 and 441.

46. The fusion protein of claim 44, wherein the DNA repair protein and the cytidine deaminase domain are fused via a linker comprising the amino acid sequence of any one of SEQ ID NOs: 102-109 and 441.

47. The fusion protein of claim 44, wherein the napDNAbp domain and the DNA repair protein are fused via a linker comprising the amino acid sequence of any one of SEQ ID NOs: 102-109 and 441.

48. The fusion protein of claim 44, wherein the napDNAbp domain and the second DNA repair protein are fused via a linker comprising the amino acid sequence of any one of SEQ ID NOs: 102-109 and 441.

49. The method of any one of claims 38, 39, and 45-48, wherein the linker is 32 amino acids in length.

50. The fusion protein of any one of claims 1-49 further comprising one or more nuclear localization sequences (NLS).

51. The fusion protein of claim 50, wherein the one or more NLSs is a bipartite NLS (BPNLS).

52. The fusion protein of claim 50 or 51, wherein the one or more nuclear localization sequences comprises an amino acid sequence selected from PKKKRKV (SEQ ID NO: 41), MDSLLMNRRKFLYQFKNVRWAKGRRETYLC (SEQ ID NO: 42), KRTADGSEFESPKKKRKV (SEQ ID NO: 43), and KRTADGSEFEPKKKRKV (SEQ ID NO: 440).

53. The fusion protein of any one of claims 50-52, wherein the one or more nuclear localization sequences comprises the amino acid sequence KRTADGSEFESPKKKRKV (SEQ ID NO: 43) or KRTADGSEFEPKKKRKV (SEQ ID NO: 440).

54. The fusion protein of any one of claims 51-53, wherein the fusion protein comprises the structure:
NH₂-[BPNLS]-[second UBP domain]-[cytidine deaminase domain]-[first UBP domain]-[napDNAbp domain]-[BPNLS]-COOH;
NH₂-[BPNLS]-[second UBP domain]-[cytidine deaminase domain]-[first UBP domain]-[napDNAbp domain]-[DNA repair protein]-[BPNLS]-COOH;
NH₂-[BPNLS]-[DNA repair protein]-[cytidine deaminase domain]-[first UBP domain]-[napDNAbp domain]-[BPNLS]-COOH;
NH₂-[BPNLS]-[second UBP domain]-[cytidine deaminase domain]-[first UBP domain]-[napDNAbp domain]-[third UBP domain]-[BPNLS]-COOH;
NH₂-[BPNLS]-[DNA repair protein]-[cytidine deaminase domain]-[first UBP domain]-[napDNAbp domain]-[second UBP domain]-[BPNLS]-COOH; and
NH₂-[BPNLS]-[DNA repair protein]-[cytidine deaminase domain]-[first UBP domain]-[napDNAbp domain]-[second DNA repair protein]-[BPNLS]-COOH;
wherein each instance of “]-[” comprises an optional linker.

55. The fusion protein of any one of claims 37-54, wherein the fusion protein comprises the structure:
[UdgX]-[Anc689 deaminase]-[UdgX]-[nCas9 domain];
[UdgX]-[Anc689 deaminase]-[UdgX]-[nCas9 domain]-[RBMX];
[UdgX]-[EE deaminase]-[UdgX]-[nCas9 domain]-[UdgX];
[UdgX]-[rAPOBEC1 deaminase]-[UdgX]-[HF-nCas9 domain];
[UdgX]-[rAPOBEC1 deaminase]-[UdgX]-[HF-nCas9 domain]-[UdgX];
[RBMX]-[e3A deaminase]-[UdgX]-[nCas9 domain];
[RBMX]-[e3A deaminase]-[UdgX]-[HF-nCas9 domain];
[POLD2]-[rAPOBEC1 deaminase]-[UdgX]-[nCas9 domain];
[POLD2]-[rAPOBEC1 deaminase]-[UdgX]-[nCas9 domain]-[UdgX];
[POLD2]-[rAPOBEC1 deaminase]-[UdgX]-[nCas9 domain]-[RBMX];
[EXO1]-[rAPOBEC1 deaminase]-[UdgX]-[nCas9 domain];
[UdgX]-[Anc689 deaminase]-[UdgX]-[nCas9-NG domain]-[RBMX];
[UdgX]-[rAPOBEC1 deaminase]-[UdgX]-[nCas9-NG domain]; and
[UdgX]-[rAPOBEC1 deaminase]-[UdgX]-[HF-nCas9-NG domain],
wherein each instance of “]-[” comprises an optional linker.

56. The fusion protein of any one of claims 37-55, wherein the fusion protein comprises the structure: [POLD2]-[rAPOBEC1 deaminase]-[UdgX]-[nCas9 domain]-[UdgX]; [UdgX]-[EE deaminase]-[UdgX]-[nCas9 domain]-[UdgX]; or [UdgX]-[Anc689 deaminase]-[UdgX]-[nCas9 domain]-[RBMX].

57. A complex comprising a guide RNA molecule and the fusion protein of any one of claims 1-56.

58. The complex of claim 57, wherein the guide RNA is from 15-100 nucleotides long and comprises a sequence of at least 10, at least 15, or at least 20 contiguous nucleotides that is complementary to a target sequence.

59. The complex of claim 57 or 58, wherein the guide RNA comprises a sequence of 15, 16, 17, 18, 19, 20, 21, 22, 23, 24, 25, 26, 27, 28, 29, 30, 31, 32, 33, 34, 35, 36, 37, 38, 39, or 40 contiguous nucleotides that is complementary to a target sequence.

60. The complex of any one of claims 57-59, wherein the guide RNA is 20, 21, 22, 23, 24, 25, 26, 27, 28, 29, 30, 31, 32, 33, 34, 35, 36, 37, 38, 39, 40, 41, 42, 43, 44, 45, 46, 47, 48, 49, 50, 55, 60, 65, 70, 75, 80, 85, 90, 95, 100, 125, 150, 175, or 200 nucleotides long.

61. The complex of any one of claims 57-60, wherein the target sequence is a DNA sequence.

62. The complex of any one of claims 57-61, wherein the target sequence is in the genome of an organism.

63. The complex of claim 62, wherein the organism is a bacteria.

64. The complex of claim 62, wherein the organism is a eukaryote.

65. The complex of claim 62, wherein the organism is a plant or fungus.

66. The complex of claim 62, wherein the organism is a vertebrate.

67. The complex of claim 66, wherein the vertebrate is a mammal.

68. The complex of claim 67, wherein the mammal is a rodent.

69. The complex of claim 67, wherein the mammal is a human.

70. The complex of any one of claims 57-69, wherein the target sequence is in the genome of a cell.

71. The complex of claim 70, wherein the cell is a mouse cell, a rat cell, or human cell.

72. A polynucleotide encoding the fusion protein of any one of claims 1-56.

73. A vector comprising the polynucleotide of claim 72.

74. The vector of claim 73, wherein the vector comprises a heterologous promoter driving expression of the polynucleotide.

75. The vector of 73 or 74 further comprising a polynucleotide encoding a gRNA.

76. The vector of any one of claims 73-76, wherein the vector is a recombinant AAV vector.

77. The vector of claim 76, wherein the recombinant AAV vector is a dual recombinant AAV vector.

78. A cell comprising the fusion protein of any one of claims 1-56 or the complex of any one of claims 57-71.

79. A cell comprising the polynyucleotide of claim 576 or the vector of any one of claims 577-B21.

80. A pharmaceutical composition comprising the fusion protein of any one of claims 1-56, the complex of any one of claims 57-71, the vector of any one of claims 73-77, or the cell of claim 78 or 79.

81. The pharmaceutical composition of claim 80 further comprising a pharmaceutically acceptable excipient.

82. A method comprising contacting a nucleic acid molecule with the fusion protein of any one of claims 1-56 or the complex of any one of claims 57-71.

83. The method of claim 82, wherein the nucleic acid comprises a target sequence in the genome of a cell.

84. The method of claim 82 or 83, wherein the nucleic acid is DNA.

85. The method of claim 83 or 84, wherein the target sequence comprises a sequence associated with a disease or disorder.

86. The method of any one of claims 83-85, wherein the target sequence comprises a sequence in a gene selected from COL31, BR83, NSD1, and NIPBL.

87. The method of any one of claims 83-86, wherein the target sequence comprises a point mutation associated with a disease or disorder.

88. The method of claim 87, wherein the activity of the fusion protein or the complex results in a correction of the point mutation.

89. The method of any one of claims 83-88, wherein the target sequence comprises a G to C point mutation associated with a disease or disorder, and wherein a deamination of the mutant C base and excision of the resulting uracil results in a sequence that is not associated with the disease or disorder.

90. The method of any one of claims 83-88, wherein the target sequence comprises a C to G point mutation associated with a disease or disorder, and wherein a deamination of the C base that is complementary to the G base of the C to G point mutation, and excision of the resulting uracil, results in a sequence that is not associated with the disease or disorder.

91. A method comprising contacting a nucleic acid molecule that comprises a target sequence with a guide RNA and a fusion protein selected from Anc689-nCas9, e3A-nCas9, EE-nCas9, and rAPOBEC1-nCas9;
wherein the target sequence comprises a G to C point mutation associated with a disease or disorder, and wherein a deamination of the mutant C base, and excision of the resulting uracil, results in a sequence that is not associated with the disease or disorder.

92. A method comprising contacting a nucleic acid molecule that comprises a target sequence with a guide RNA and a fusion protein selected from Anc689-nCas9, e3A-nCas9, EE-nCas9, and rAPOBEC1-nCas9;
wherein the target sequence comprises a C to G point mutation associated with a disease or disorder, and wherein a deamination of the C base that is complementary to the G base of the C to G point mutation, and excision of the resulting uracil, results in a sequence that is not associated with the disease or disorder.

93. The method of any one of claims 83-92, wherein the target sequence encodes a protein, and wherein the point mutation is in a codon and results in a change in the amino acid encoded by the mutant codon as compared to a wild-type codon.

94. The method of claim 93, wherein the deamination and excision results in a change of the amino acid encoded by the mutant codon.

95. The method of claim 93 or 94, wherein the deamination and excision generates the codon encoding a wild-type amino acid.

96. The method of any one of claims 82-95, wherein the step of contacting is performed in vivo in a subject.

97. The method of any one of claims 82-95, wherein the step of contacting is performed in vitro or ex vivo.

98. The method of claim 96, wherein the subject has been diagnosed with a disease or disorder.

99. The method of claim 98, wherein the disease or disorder is Ehlers-Danlos syndrome, Sotos syndrome, Cornelia de Lange syndrome, or a cancer.

100. The method of any one of claims 82-99, wherein the target sequence comprises the DNA sequence RCTA or TCR, wherein R may be any nucleotide.

101. The method of claim 100, wherein the target sequence comprises the DNA sequence ACTA.

102. The method of any one of claims 82-101, wherein the product purity of conversion of the C to a G is at least 65%, 70%, 73%, 75%, 77%, 80%, 82%, 83%, 84%, 86%, 88%, 90%, 92.5%, or 95%.

103. The method of claim 102, wherein the product purity is at least 83%.

104. The method of claim 102, wherein the product purity is at least 73%.

105. The method of any one of claims 82-104, wherein the average efficiency of conversion of the C to a G is at least 70%, 73%, 75%, 77%, 80%, 82%, 83%, 84%, 86%, 88%, 90%, 92.5%, 95%, or 98%.

106. The method of any one of claims 82-105, wherein the average off-target editing frequency is less than 6%, less than 5%, less than 4%, less than 3%, less than 2%, less than 1.25%, less than 1%, less than 0.75%, less than 0.5%, less than 0.4%, less than 0.25%, less than 0.2%, less than 0.15%, or less than 0.1%.

107. A method for editing a nucleobase pair of a double-stranded DNA sequence, the method comprising:
contacting a target region of the double-stranded DNA sequence with a complex comprising the fusion protein of any one of claims 1-56, or any of the fusion proteins in accordance with claim 91 or 92, and a guide nucleic acid, wherein the target region comprises a target nucleobase pair; and thereby:
inducing strand separation of the target region;
converting a cytosine of the target nucleobase pair in a single strand of the target region to a uracil;
excising the uracil from the double-stranded DNA sequence to produce an abasic site, wherein a guanine opposite the abasic site is replaced by a cytosine;
cutting no more than one strand of the target region; and
inserting a guanine into the abasic site, and thereby generating an intended edited base pair.

108. The method of claim 107, wherein the method causes less than 20% to less than 1% indel formation.

109. The method of claim 107 or 108, wherein the efficiency of generating the intended edited base pair is at least 73%.

110. The method of claim 107 or 108, wherein the ratio of intended edited basepairs to unintended edited basepairs is between 2:1 and 10:1.

111. The method of claim 107 or 108, wherein the ratio of intended edited basepairs to indel formation is between 2:1 and 200:1.

112. The method of any one of claims 107-111, wherein the intended edited base pair is upstream of a PAM site.

113. The method of any one of claims 107-111, wherein the intended edited base pair is downstream of a PAM site.

114. The method of any one of claims 107-113, wherein the target region comprises a target window, wherein the target window comprises the target nucleobase pair.

115. The method of claim 114, wherein the target window comprises 3-8 nucleotides.

116. The method of claim 114 or 115, wherein the target window is 1-8, 1-7, 1-6, 1-5, 1-4, or 1-3 nucleotides in length.

117. The method of any one of claims 114-116, wherein the target window is 1, 2, 3, 4, 5, 6, 7, 8, 9, 10, or more than 10 nucleotides in length.

118. The method of any one of claims 114-117, wherein the target window comprises the intended edited base pair.

119. A method of using a machine learning model to identify at least one fusion protein from among a set of one or more fusion proteins, for use in a base editing system for introducing a cytosine to guanine change in a nucleotide sequence, the method comprising:
using software executing on at least one computer hardware processor to perform:
obtaining input data indicative of the nucleotide sequence, one or more guide RNAs, and the set of fusion proteins, wherein the at least one fusion protein comprises a napDNAbp domain, a cytidine deaminase domain, and at least one uracil binding protein;
generating first input features from the input data;
applying a first machine learning model to the first input features to obtain first output data indicative, for each fusion protein in the set, of a base editing efficiency at one or multiple locations in the nucleotide sequence, of the base editing system when using the each fusion protein;
generating second input features from the input data;
applying a second machine learning model to the second input features to obtain second output data indicative, for each fusion protein in the set, of a base editing product purity at one or multiple locations in the nucleotide sequence, by the base editing system when using the each fusion protein; and
identifying, using the first output data and the second output data, the at least one fusion protein for use in the base editing system for introducing the cytosine to guanine change in the nucleotide sequence.

120. The method of claim 119 further comprising applying a third machine learning model to the second input features to obtain third output data indicative, for each fusion protein in the set, of a bystander editing efficiency at one or multiple locations in the nucleotide sequence, by the base editing system when using the each fusion protein.

121. The method of claim 119 or 120, wherein the set of fusion proteins comprises the fusion protein of any one of claims 1-56 and any of the fusion proteins in accordance with claim 820 or 821.

122. A method of treating a subject having or suspected of having a disease or disorder comprising administering the fusion protein of any one of claims 1-56, the complex of any one of claims 57-71, the polynucleotide of claim 72, the vector of any one of claims 73-77, the cell of claim 78 or 79, or the pharmaceutical composition of claim 80 or 81 to the subject.

123. The method of claim 122, wherein the subject is a human.

124. The method of claim 122 or 123, wherein the disease or disorder is Ehlers-Danlos syndrome, Sotos syndrome, Cornelia de Lange syndrome, or a cancer.

125. Use of (a) the fusion protein of any one of claims 1-56 and (b) a guide RNA targeting the fusion protein of (a) to a target C:G nucleobase pair in a double-stranded DNA molecule in DNA editing.

126. The use of claim 125, whereby the DNA editing comprises nicking one strand of the double-stranded DNA, wherein the one strand comprises the G of the target C:G nucleobase pair.

127. Use of the fusion protein of any one of claims 1-56, the complex of any one of claims 57-71, the vector of any one of claims 73-77, the cell of claim 78 or 79, or the pharmaceutical composition of claim 80 or 81 as a medicament.

128. A kit comprising a nucleic acid construct, comprising
(a) a nucleic acid sequence encoding the fusion protein of any one of claims 1-56;
(b) a nucleic acid sequence encoding a gRNA; and
(c) one or more heterologous promoters that drive the expression of the sequence of (a) and/or the sequence of (b).

The application's sequence listing, which the Patent Office published only in electronic form, follows.

SEQUENCE LISTING (746 sequences)

SEQ ID NO: 1 - DNA, 4104 bp, Streptococcus pyogenes
atggataagaaatactcaataggcttagatatcggcacaaatagcgtcggatgggcggtgatcactgatgattataaggttccgtctaaaaagttcaaggttctgggaaatacagaccgccacagtatcaaaaaaaatcttataggggctcttttatttggcagtggagagacagcggaagcgactcgtctcaaacggacagctcgtagaaggtatacacgtcggaagaatcgtatttgttatctacaggagattttttcaaatgagatggcgaaagtagatgatagtttctttcatcgacttgaagagtcttttttggtggaagaagacaagaagcatgaacgtcatcctatttttggaaatatagtagatgaagttgcttatcatgagaaatatccaactatctatcatctgcgaaaaaaattggcagattctactgataaagcggatttgcgcttaatctatttggccttagcgcatatgattaagtttcgtggtcattttttgattgagggagatttaaatcctgataatagtgatgtggacaaactatttatccagttggtacaaatctacaatcaattatttgaagaaaaccctattaacgcaagtagagtagatgctaaagcgattctttctgcacgattgagtaaatcaagacgattagaaaatctcattgctcagctccccggtgagaagagaaatggcttgtttgggaatctcattgctttgtcattgggattgacccctaattttaaatcaaattttgatttggcagaagatgctaaattacagctttcaaaagatacttacgatgatgatttagataatttattggcgcaaattggagatcaatatgctgatttgtttttggcagctaagaatttatcagatgctattttactttcagatatcctaagagtaaatagtgaaataactaaggctcccctatcagcttcaatgattaagcgctacgatgaacatcatcaagacttgactcttttaaaagctttagttcgacaacaacttccagaaaagtataaagaaatcttttttgatcaatcaaaaaacggatatgcaggttatattgatgggggagctagccaagaagaattttataaatttatcaaaccaattttagaaaaaatggatggtactgaggaattattggtgaaactaaatcgtgaagatttgctgcgcaagcaacggacctttgacaacggctctattccccatcaaattcacttgggtgagctgcatgctattttgagaagacaagaagacttttatccatttttaaaagacaatcgtgagaagattgaaaaaatcttgacttttcgaattccttattatgttggtccattggcgcgtggcaatagtcgttttgcatggatgactcggaagtctgaagaaacaattaccccatggaattttgaagaagttgtcgataaaggtgcttcagctcaatcatttattgaacgcatgacaaactttgataaaaatcttccaaatgaaaaagtactaccaaaacatagtttgctttatgagtattttacggtttataacgaattgacaaaggtcaaatatgttactgagggaatgcgaaaaccagcatttctttcaggtgaacagaagaaagccattgttgatttactcttcaaaacaaatcgaaaagtaaccgttaagcaattaaaagaagattatttcaaaaaaatagaatgttttgatagtgttgaaatttcaggagttgaagatagatttaatgcttcattaggcgcctaccatgatttgctaaaaattattaaagataaagattttttggataatgaagaaaatgaagatatcttagaggatattgttttaacattgaccttatttgaagatagggggatgattgaggaaagacttaaaacatatgctcacctctttgatgataaggtgatgaaacagcttaaacgtcgccgttatactggttggggacgtttgtctcgaaaattgattaatggtattagggataagcaatctggcaaaacaatattagattttttgaaatcagatggttttgccaatcgcaattttatgcagctgatccatgatgatagtttgacatttaaagaagatattcaaaaagcacaggtgtctggacaaggccatagtttacatgaacagattgctaacttagctggcagtcctgctattaaaaaaggtattttacagactgtaaaaattgttgatgaactggtcaaagtaatggggcataagccagaaaatatcgttattgaaatggcacgtgaaaatcagacaactcaaaagggccagaaaaattcgcgagagcgtatgaaacgaatcgaagaaggtatcaaagaattaggaagtcagattcttaaagagcatcctgttgaaaatactcaattgcaaaatgaaaagctctatctctattatctacaaaatggaagagacatgtatgtggaccaagaattagatattaatcgtttaagtgattatgatgtcgatcacattgttccacaaagtttcattaaagacgattcaatagacaataaggtactaacgcgttctgataaaaatcgtggtaaatcggataacgttccaagtgaagaagtagtcaaaaagatgaaaaactattggagacaacttctaaacgccaagttaatcactcaacgtaagtttgataatttaacgaaagctgaacgtggaggtttgagtgaacttgataaagctggttttatcaaacgccaattggttgaaactcgccaaatcactaagcatgtggcacaaattttggatagtcgcatgaatactaaatacgatgaaaatgataaacttattcgagaggttaaagtgattaccttaaaatctaaattagtttctgacttccgaaaagatttccaattctataaagtacgtgagattaacaattaccatcatgcccatgatgcgtatctaaatgccgtcgttggaactgctttgattaagaaatatccaaaacttgaatcggagtttgtctatggtgattataaagtttatgatgttcgtaaaatgattgctaagtctgagcaagaaataggcaaagcaaccgcaaaatatttcttttactctaatatcatgaacttcttcaaaacagaaattacacttgcaaatggagagattcgcaaacgccctctaatcgaaactaatggggaaactggagaaattgtctgggataaagggcgagattttgccacagtgcgcaaagtattgtccatgccccaagtcaatattgtcaagaaaacagaagtacagacaggcggattctccaaggagtcaattttaccaaaaagaaattcggacaagcttattgctcgtaaaaaagactgggatccaaaaaaatatggtggttttgatagtccaacggtagcttattcagtcctagtggttgctaaggtggaaaaagggaaatcgaagaagttaaaatccgttaaagagttactagggatcacaattatggaaagaagttcctttgaaaaaaatccgattgactttttagaagctaaaggatataaggaagttaaaaaagacttaatcattaaactacctaaatatagtctttttgagttagaaaacggtcgtaaacggatgctggctagtgccggagaattacaaaaaggaaatgagctggctctgccaagcaaatatgtgaattttttatatttagctagtcattatgaaaagttgaagggtagtccagaagataacgaacaaaaacaattgtttgtggagcagcataagcattatttagatgagattattgagcaaatcagtgaattttctaagcgtgttattttagcagatgccaatttagataaagttcttagtgcatataacaaacatagagacaaaccaatacgtgaacaagcagaaaatattattcatttatttacgttgacgaatcttggagctcccgctgcttttaaatattttgatacaacaattgatcgtaaacgatatacgtctacaaaagaagttttagatgccactcttatccatcaatccatcactggtctttatgaaacacgcattgatttgagtcagctaggaggtgactga

SEQ ID NO: 2 - DNA, 4212 bp, Streptococcus pyogenes
atggataaaaagtattctattggtttagacatcggcactaattccgttggatgggctgtcataaccgatgaatacaaagtaccttcaaagaaatttaaggtgttggggaacacagaccgtcattcgattaaaaagaatcttatcggtgccctcctattcgatagtggcgaaacggcagaggcgactcgcctgaaacgaaccgctcggagaaggtatacacgtcgcaagaaccgaatatgttacttacaagaaatttttagcaatgagatggccaaagttgacgattctttctttcaccgtttggaagagtccttccttgtcgaagaggacaagaaacatgaacggcaccccatctttggaaacatagtagatgaggtggcatatcatgaaaagtacccaacgatttatcacctcagaaaaaagctagttgactcaactgataaagcggacctgaggttaatctacttggctcttgcccatatgataaagttccgtgggcactttctcattgagggtgatctaaatccggacaactcggatgtcgacaaactgttcatccagttagtacaaacctataatcagttgtttgaagagaaccctataaatgcaagtggcgtggatgcgaaggctattcttagcgcccgcctctctaaatcccgacggctagaaaacctgatcgcacaattacccggagagaagaaaaatgggttgttcggtaaccttatagcgctctcactaggcctgacaccaaattttaagtcgaacttcgacttagctgaagatgccaaattgcagcttagtaaggacacgtacgatgacgatctcgacaatctactggcacaaattggagatcagtatgcggacttatttttggctgccaaaaaccttagcgatgcaatcctcctatctgacatactgagagttaatactgagattaccaaggcgccgttatccgcttcaatgatcaaaaggtacgatgaacatcaccaagacttgacacttctcaaggccctagtccgtcagcaactgcctgagaaatataaggaaatattctttgatcagtcgaaaaacgggtacgcaggttatattgacggcggagcgagtcaagaggaattctacaagtttatcaaacccatattagagaagatggatgggacggaagagttgcttgtaaaactcaatcgcgaagatctactgcgaaagcagcggactttcgacaacggtagcattccacatcaaatccacttaggcgaattgcatgctatacttagaaggcaggaggatttttatccgttcctcaaagacaatcgtgaaaagattgagaaaatcctaacctttcgcataccttactatgtgggacccctggcccgagggaactctcggttcgcatggatgacaagaaagtccgaagaaacgattactccatggaattttgaggaagttgtcgataaaggtgcgtcagctcaatcgttcatcgagaggatgaccaactttgacaagaatttaccgaacgaaaaagtattgcctaagcacagtttactttacgagtatttcacagtgtacaatgaactcacgaaagttaagtatgtcactgagggcatgcgtaaacccgcctttctaagcggagaacagaagaaagcaatagtagatctgttattcaagaccaaccgcaaagtgacagttaagcaattgaaagaggactactttaagaaaattgaatgcttcgattctgtcgagatctccggggtagaagatcgatttaatgcgtcacttggtacgtatcatgacctcctaaagataattaaagataaggacttcctggataacgaagagaatgaagatatcttagaagatatagtgttgactcttaccctctttgaagatcgggaaatgattgaggaaagactaaaaacatacgctcacctgttcgacgataaggttatgaaacagttaaagaggcgtcgctatacgggctggggacgattgtcgcggaaacttatcaacgggataagagacaagcaaagtggtaaaactattctcgattttctaaagagcgacggcttcgccaataggaactttatgcagctgatccatgatgactctttaaccttcaaagaggatatacaaaaggcacaggtttccggacaaggggactcattgcacgaacatattgcgaatcttgctggttcgccagccatcaaaaagggcatactccagacagtcaaagtagtggatgagctagttaaggtcatgggacgtcacaaaccggaaaacattgtaatcgagatggcacgcgaaaatcaaacgactcagaaggggcaaaaaaacagtcgagagcggatgaagagaatagaagagggtattaaagaactgggcagccagatcttaaaggagcatcctgtggaaaatacccaattgcagaacgagaaactttacctctattacctacaaaatggaagggacatgtatgttgatcaggaactggacataaaccgtttatctgattacgacgtcgatcacattgtaccccaatcctttttgaaggacgattcaatcgacaataaagtgcttacacgctcggataagaaccgagggaaaagtgacaatgttccaagcgaggaagtcgtaaagaaaatgaagaactattggcggcagctcctaaatgcgaaactgataacgcaaagaaagttcgataacttaactaaagctgagaggggtggcttgtctgaacttgacaaggccggatttattaaacgtcagctcgtggaaacccgccaaatcacaaagcatgttgcacagatactagattcccgaatgaatacgaaatacgacgagaacgataagctgattcgggaagtcaaagtaatcactttaaagtcaaaattggtgtcggacttcagaaaggattttcaattctataaagttagggagataaataactaccaccatgcgcacgacgcttatcttaatgccgtcgtagggaccgcactcattaagaaatacccgaagctagaaagtgagtttgtgtatggtgattacaaagtttatgacgtccgtaagatgatcgcgaaaagcgaacaggagataggcaaggctacagccaaatacttcttttattctaacattatgaatttctttaagacggaaatcactctggcaaacggagagatacgcaaacgacctttaattgaaaccaatggggagacaggtgaaatcgtatgggataagggccgggacttcgcgacggtgagaaaagttttgtccatgccccaagtcaacatagtaaagaaaactgaggtgcagaccggagggttttcaaaggaatcgattcttccaaaaaggaatagtgataagctcatcgctcgtaaaaaggactgggacccgaaaaagtacggtggcttcgatagccctacagttgcctattctgtcctagtagtggcaaaagttgagaagggaaaatccaagaaactgaagtcagtcaaagaattattggggataacgattatggagcgctcgtcttttgaaaagaaccccatcgacttccttgaggcgaaaggttacaaggaagtaaaaaaggatctcataattaaactaccaaagtatagtctgtttgagttagaaaatggccgaaaacggatgttggctagcgccggagagcttcaaaaggggaacgaactcgcactaccgtctaaatacgtgaatttcctgtatttagcgtcccattacgagaagttgaaaggttcacctgaagataacgaacagaagcaactttttgttgagcagcacaaacattatctcgacgaaatcatagagcaaatttcggaattcagtaagagagtcatcctagctgatgccaatctggacaaagtattaagcgcatacaacaagcacagggataaacccatacgtgagcaggcggaaaatattatccatttgtttactcttaccaacctcggcgctccagccgcattcaagtattttgacacaacgatagatcgcaaacgatacacttctaccaaggaggtgctagacgcgacactgattcaccaatccatcacgggattatatgaaactcggatagatttgtcacagcttgggggtgacggatcccccaagaagaagaggaaagtctcgagcgactacaaagaccatgacggtgattataaagatcatgacatcgattacaaggatgacgatgacaaggctgcagga

SEQ ID NO: 3 - DNA, 4107 bp, Streptococcus pyogenes
atggataagaaatactcaataggcttagatatcggcacaaatagcgtcggatgggcggtgatcactgatgaatataaggttccgtctaaaaagttcaaggttctgggaaatacagaccgccacagtatcaaaaaaaatcttataggggctcttttatttgacagtggagagacagcggaagcgactcgtctcaaacggacagctcgtagaaggtatacacgtcggaagaatcgtatttgttatctacaggagattttttcaaatgagatggcgaaagtagatgatagtttctttcatcgacttgaagagtcttttttggtggaagaagacaagaagcatgaacgtcatcctatttttggaaatatagtagatgaagttgcttatcatgagaaatatccaactatctatcatctgcgaaaaaaattggtagattctactgataaagcggatttgcgcttaatctatttggccttagcgcatatgattaagtttcgtggtcattttttgattgagggagatttaaatcctgataatagtgatgtggacaaactatttatccagttggtacaaacctacaatcaattatttgaagaaaaccctattaacgcaagtggagtagatgctaaagcgattctttctgcacgattgagtaaatcaagacgattagaaaatctcattgctcagctccccggtgagaagaaaaatggcttatttgggaatctcattgctttgtcattgggtttgacccctaattttaaatcaaattttgatttggcagaagatgctaaattacagctttcaaaagatacttacgatgatgatttagataatttattggcgcaaattggagatcaatatgctgatttgtttttggcagctaagaatttatcagatgctattttactttcagatatcctaagagtaaatactgaaataactaaggctcccctatcagcttcaatgattaaacgctacgatgaacatcatcaagacttgactcttttaaaagctttagttcgacaacaacttccagaaaagtataaagaaatcttttttgatcaatcaaaaaacggatatgcaggttatattgatgggggagctagccaagaagaattttataaatttatcaaaccaattttagaaaaaatggatggtactgaggaattattggtgaaactaaatcgtgaagatttgctgcgcaagcaacggacctttgacaacggctctattccccatcaaattcacttgggtgagctgcatgctattttgagaagacaagaagacttttatccatttttaaaagacaatcgtgagaagattgaaaaaatcttgacttttcgaattccttattatgttggtccattggcgcgtggcaatagtcgttttgcatggatgactcggaagtctgaagaaacaattaccccatggaattttgaagaagttgtcgataaaggtgcttcagctcaatcatttattgaacgcatgacaaactttgataaaaatcttccaaatgaaaaagtactaccaaaacatagtttgctttatgagtattttacggtttataacgaattgacaaaggtcaaatatgttactgaaggaatgcgaaaaccagcatttctttcaggtgaacagaagaaagccattgttgatttactcttcaaaacaaatcgaaaagtaaccgttaagcaattaaaagaagattatttcaaaaaaatagaatgttttgatagtgttgaaatttcaggagttgaagatagatttaatgcttcattaggtacctaccatgatttgctaaaaattattaaagataaagattttttggataatgaagaaaatgaagatatcttagaggatattgttttaacattgaccttatttgaagatagggagatgattgaggaaagacttaaaacatatgctcacctctttgatgataaggtgatgaaacagcttaaacgtcgccgttatactggttggggacgtttgtctcgaaaattgattaatggtattagggataagcaatctggcaaaacaatattagattttttgaaatcagatggttttgccaatcgcaattttatgcagctgatccatgatgatagtttgacatttaaagaagacattcaaaaagcacaagtgtctggacaaggcgatagtttacatgaacatattgcaaatttagctggtagccctgctattaaaaaaggtattttacagactgtaaaagttgttgatgaattggtcaaagtaatggggcggcataagccagaaaatatcgttattgaaatggcacgtgaaaatcagacaactcaaaagggccagaaaaattcgcgagagcgtatgaaacgaatcgaagaaggtatcaaagaattaggaagtcagattcttaaagagcatcctgttgaaaatactcaattgcaaaatgaaaagctctatctctattatctccaaaatggaagagacatgtatgtggaccaagaattagatattaatcgtttaagtgattatgatgtcgatcacattgttccacaaagtttccttaaagacgattcaatagacaataaggtcttaacgcgttctgataaaaatcgtggtaaatcggataacgttccaagtgaagaagtagtcaaaaagatgaaaaactattggagacaacttctaaacgccaagttaatcactcaacgtaagtttgataatttaacgaaagctgaacgtggaggtttgagtgaacttgataaagctggttttatcaaacgccaattggttgaaactcgccaaatcactaagcatgtggcacaaattttggatagtcgcatgaatactaaatacgatgaaaatgataaacttattcgagaggttaaagtgattaccttaaaatctaaattagtttctgacttccgaaaagatttccaattctataaagtacgtgagattaacaattaccatcatgcccatgatgcgtatctaaatgccgtcgttggaactgctttgattaagaaatatccaaaacttgaatcggagtttgtctatggtgattataaagtttatgatgttcgtaaaatgattgctaagtctgagcaagaaataggcaaagcaaccgcaaaatatttcttttactctaatatcatgaacttcttcaaaacagaaattacacttgcaaatggagagattcgcaaacgccctctaatcgaaactaatggggaaactggagaaattgtctgggataaagggcgagattttgccacagtgcgcaaagtattgtccatgccccaagtcaatattgtcaagaaaacagaagtacagacaggcggattctccaaggagtcaattttaccaaaaagaaattcggacaagcttattgctcgtaaaaaagactgggatccaaaaaaatatggtggttttgatagtccaacggtagcttattcagtcctagtggttgctaaggtggaaaaagggaaatcgaagaagttaaaatccgttaaagagttactagggatcacaattatggaaagaagttcctttgaaaaaaatccgattgactttttagaagctaaaggatataaggaagttaaaaaagacttaatcattaaactacctaaatatagtctttttgagttagaaaacggtcgtaaacggatgctggctagtgccggagaattacaaaaaggaaatgagctggctctgccaagcaaatatgtgaattttttatatttagctagtcattatgaaaagttgaagggtagtccagaagataacgaacaaaaacaattgtttgtggagcagcataagcattatttagatgagattattgagcaaatcagtgaattttctaagcgtgttattttagcagatgccaatttagataaagttcttagtgcatataacaaacatagagacaaaccaatacgtgaacaagcagaaaatattattcatttatttacgttgacgaatcttggagctcccgctgcttttaaatattttgatacaacaattgatcgtaaacgatatacgtctacaaaagaagttttagatgccactcttatccatcaatccatcactggtctttatgaaacacgcattgatttgagtcagctaggaggtgactga

SEQ ID NO: 4 - protein, 1367 aa, Streptococcus pyogenes
MDKKYSIGLDIGTNSVGWAVITDDYKVPSKKFKVLGNTDRHSIKKNLIGALLFGSGETAEATRLKRTARRRYTRRKNRICYLQEIFSNEMAKVDDSFFHRLEESFLVEEDKKHERHPIFGNIVDEVAYHEKYPTIYHLRKKLADSTDKADLRLIYLALAHMIKFRGHFLIEGDLNPDNSDVDKLFIQLVQIYNQLFEENPINASRVDAKAILSARLSKSRRLENLIAQLPGEKRNGLFGNLIALSLGLTPNFKSNFDLAEDAKLQLSKDTYDDDLDNLLAQIGDQYADLFLAAKNLSDAILLSDILRVNSEITKAPLSASMIKRYDEHHQDLTLLKALVRQQLPEKYKEIFFDQSKNGYAGYIDGGASQEEFYKFIKPILEKMDGTEELLVKLNREDLLRKQRTFDNGSIPHQIHLGELHAILRRQEDFYPFLKDNREKIEKILTFRIPYYVGPLARGNSRFAWMTRKSEETITPWNFEEVVDKGASAQSFIERMTNFDKNLPNEKVLPKHSLLYEYFTVYNELTKVKYVTEGMRKPAFLSGEQKKAIVDLLFKTNRKVTVKQLKEDYFKKIECFDSVEISGVEDRFNASLGAYHDLLKIIKDKDFLDNEENEDILEDIVLTLTLFEDRGMIEERLKTYAHLFDDKVMKQLKRRRYTGWGRLSRKLINGIRDKQSGKTILDFLKSDGFANRNFMQLIHDDSLTFKEDIQKAQVSGQGHSLHEQIANLAGSPAIKKGILQTVKIVDELVKVMGHKPENIVIEMARENQTTQKGQKNSRERMKRIEEGIKELGSQILKEHPVENTQLQNEKLYLYYLQNGRDMYVDQELDINRLSDYDVDHIVPQSFIKDDSIDNKVLTRSDKNRGKSDNVPSEEVVKKMKNYWRQLLNAKLITQRKFDNLTKAERGGLSELDKAGFIKRQLVETRQITKHVAQILDSRMNTKYDENDKLIREVKVITLKSKLVSDFRKDFQFYKVREINNYHHAHDAYLNAVVGTALIKKYPKLESEFVYGDYKVYDVRKMIAKSEQEIGKATAKYFFYSNIMNFFKTEITLANGEIRKRPLIETNGETGEIVWDKGRDFATVRKVLSMPQVNIVKKTEVQTGGFSKESILPKRNSDKLIARKKDWDPKKYGGFDSPTVAYSVLVVAKVEKGKSKKLKSVKELLGITIMERSSFEKNPIDFLEAKGYKEVKKDLIIKLPKYSLFELENGRKRMLASAGELQKGNELALPSKYVNFLYLASHYEKLKGSPEDNEQKQLFVEQHKHYLDEIIEQISEFSKRVILADANLDKVLSAYNKHRDKPIREQAENIIHLFTLTNLGAPAAFKYFDTTIDRKRYTSTKEVLDATLIHQSITGLYETRIDLSQLGGD

SEQ ID NO: 5 - protein, 1368 aa, Streptococcus pyogenes
MDKKYSIGLAIGTNSVGWAVITDEYKVPSKKFKVLGNTDRHSIKKNLIGALLFDSGETAEATRLKRTARRRYTRRKNRICYLQEIFSNEMAKVDDSFFHRLEESFLVEEDKKHERHPIFGNIVDEVAYHEKYPTIYHLRKKLVDSTDKADLRLIYLALAHMIKFRGHFLIEGDLNPDNSDVDKLFIQLVQTYNQLFEENPINASGVDAKAILSARLSKSRRLENLIAQLPGEKKNGLFGNLIALSLGLTPNFKSNFDLAEDAKLQLSKDTYDDDLDNLLAQIGDQYADLFLAAKNLSDAILLSDILRVNTEITKAPLSASMIKRYDEHHQDLTLLKALVRQQLPEKYKEIFFDQSKNGYAGYIDGGASQEEFYKFIKPILEKMDGTEELLVKLNREDLLRKQRTFDNGSIPHQIHLGELHAILRRQEDFYPFLKDNREKIEKILTFRIPYYVGPLARGNSRFAWMTRKSEETITPWNFEEVVDKGASAQSFIERMTNFDKNLPNEKVLPKHSLLYEYFTVYNELTKVKYVTEGMRKPAFLSGEQKKAIVDLLFKTNRKVTVKQLKEDYFKKIECFDSVEISGVEDRFNASLGTYHDLLKIIKDKDFLDNEENEDILEDIVLTLTLFEDREMIEERLKTYAHLFDDKVMKQLKRRRYTGWGRLSRKLINGIRDKQSGKTILDFLKSDGFANRNFMQLIHDDSLTFKEDIQKAQVSGQGDSLHEHIANLAGSPAIKKGILQTVKVVDELVKVMGRHKPENIVIEMARENQTTQKGQKNSRERMKRIEEGIKELGSQILKEHPVENTQLQNEKLYLYYLQNGRDMYVDQELDINRLSDYDVDHIVPQSFLKDDSIDNKVLTRSDKNRGKSDNVPSEEVVKKMKNYWRQLLNAKLITQRKFDNLTKAERGGLSELDKAGFIKRQLVETRQITKHVAQILDSRMNTKYDENDKLIREVKVITLKSKLVSDFRKDFQFYKVREINNYHHAHDAYLNAVVGTALIKKYPKLESEFVYGDYKVYDVRKMIAKSEQEIGKATAKYFFYSNIMNFFKTEITLANGEIRKRPLIETNGETGEIVWDKGRDFATVRKVLSMPQVNIVKKTEVQTGGFSKESILPKRNSDKLIARKKDWDPKKYGGFDSPTVAYSVLVVAKVEKGKSKKLKSVKELLGITIMERSSFEKNPIDFLEAKGYKEVKKDLIIKLPKYSLFELENGRKRMLASAGELQKGNELALPSKYVNFLYLASHYEKLKGSPEDNEQKQLFVEQHKHYLDEIIEQISEFSKRVILADANLDKVLSAYNKHRDKPIREQAENIIHLFTLTNLGAPAAFKYFDTTIDRKRYTSTKEVLDATLIHQSITGLYETRIDLSQLGGD

SEQ ID NO: 6 - protein, 1368 aa, Streptococcus pyogenes [sequence omitted]

SEQ ID NO: 7 - protein, 1368 aa, Artificial Sequence
  Synthetic
MDKKYSIGLAIGTNSVGWAVITDEYKVPSKKFKVLGNTDRHSIKKNLIGALLFDSGETAEATRLKRTARRRYTRRKNRICYLQEIFSNEMAKVDDSFFHRLEESFLVEEDKKHERHPIFGNIVDEVAYHEKYPTIYHLRKKLVDSTDKADLRLIYLALAHMIKFRGHFLIEGDLNPDNSDVDKLFIQLVQTYNQLFEENPINASGVDAKAILSARLSKSRRLENLIAQLPGEKKNGLFGNLIALSLGLTPNFKSNFDLAEDAKLQLSKDTYDDDLDNLLAQIGDQYADLFLAAKNLSDAILLSDILRVNTEITKAPLSASMIKRYDEHHQDLTLLKALVRQQLPEKYKEIFFDQSKNGYAGYIDGGASQEEFYKFIKPILEKMDGTEELLVKLNREDLLRKQRTFDNGSIPHQIHLGELHAILRRQEDFYPFLKDNREKIEKILTFRIPYYVGPLARGNSRFAWMTRKSEETITPWNFEEVVDKGASAQSFIERMTNFDKNLPNEKVLPKHSLLYEYFTVYNELTKVKYVTEGMRKPAFLSGEQKKAIVDLLFKTNRKVTVKQLKEDYFKKIECFDSVEISGVEDRFNASLGTYHDLLKIIKDKDFLDNEENEDILEDIVLTLTLFEDREMIEERLKTYAHLFDDKVMKQLKRRRYTGWGRLSRKLINGIRDKQSGKTILDFLKSDGFANRNFMQLIHDDSLTFKEDIQKAQVSGQGDSLHEHIANLAGSPAIKKGILQTVKVVDELVKVMGRHKPENIVIEMARENQTTQKGQKNSRERMKRIEEGIKELGSQILKEHPVENTQLQNEKLYLYYLQNGRDMYVDQELDINRLSDYDVDAIVPQSFLKDDSIDNKVLTRSDKNRGKSDNVPSEEVVKKMKNYWRQLLNAKLITQRKFDNLTKAERGGLSELDKAGFIKRQLVETRQITKHVAQILDSRMNTKYDENDKLIREVKVITLKSKLVSDFRKDFQFYKVREINNYHHAHDAYLNAVVGTALIKKYPKLESEFVYGDYKVYDVRKMIAKSEQEIGKATAKYFFYSNIMNFFKTEITLANGEIRKRPLIETNGETGEIVWDKGRDFATVRKVLSMPQVNIVKKTEVQTGGFSKESILPKRNSDKLIARKKDWDPKKYGGFDSPTVAYSVLVVAKVEKGKSKKLKSVKELLGITIMERSSFEKNPIDFLEAKGYKEVKKDLIIKLPKYSLFELENGRKRMLASAGELQKGNELALPSKYVNFLYLASHYEKLKGSPEDNEQKQLFVEQHKHYLDEIIEQISEFSKRVILADANLDKVLSAYNKHRDKPIREQAENIIHLFTLTNLGAPAAFKYFDTTIDRKRYTSTKEVLDATLIHQSITGLYETRIDLSQLGGD

SEQ ID NO: 8 - protein, 1367 aa, Artificial Sequence
  Synthetic
DKKYSIGLAIGTNSVGWAVITDEYKVPSKKFKVLGNTDRHSIKKNLIGALLFDSGETAEATRLKRTARRRYTRRKNRICYLQEIFSNEMAKVDDSFFHRLEESFLVEEDKKHERHPIFGNIVDEVAYHEKYPTIYHLRKKLVDSTDKADLRLIYLALAHMIKFRGHFLIEGDLNPDNSDVDKLFIQLVQTYNQLFEENPINASGVDAKAILSARLSKSRRLENLIAQLPGEKKNGLFGNLIALSLGLTPNFKSNFDLAEDAKLQLSKDTYDDDLDNLLAQIGDQYADLFLAAKNLSDAILLSDILRVNTEITKAPLSASMIKRYDEHHQDLTLLKALVRQQLPEKYKEIFFDQSKNGYAGYIDGGASQEEFYKFIKPILEKMDGTEELLVKLNREDLLRKQRTFDNGSIPHQIHLGELHAILRRQEDFYPFLKDNREKIEKILTFRIPYYVGPLARGNSRFAWMTRKSEETITPWNFEEVVDKGASAQSFIERMTNFDKNLPNEKVLPKHSLLYEYFTVYNELTKVKYVTEGMRKPAFLSGEQKKAIVDLLFKTNRKVTVKQLKEDYFKKIECFDSVEISGVEDRFNASLGTYHDLLKIIKDKDFLDNEENEDILEDIVLTLTLFEDREMIEERLKTYAHLFDDKVMKQLKRRRYTGWGRLSRKLINGIRDKQSGKTILDFLKSDGFANRNFMQLIHDDSLTFKEDIQKAQVSGQGDSLHEHIANLAGSPAIKKGILQTVKVVDELVKVMGRHKPENIVIEMARENQTTQKGQKNSRERMKRIEEGIKELGSQILKEHPVENTQLQNEKLYLYYLQNGRDMYVDQELDINRLSDYDVDAIVPQSFLKDDSIDNKVLTRSDKNRGKSDNVPSEEVVKKMKNYWRQLLNAKLITQRKFDNLTKAERGGLSELDKAGFIKRQLVETRQITKHVAQILDSRMNTKYDENDKLIREVKVITLKSKLVSDFRKDFQFYKVREINNYHHAHDAYLNAVVGTALIKKYPKLESEFVYGDYKVYDVRKMIAKSEQEIGKATAKYFFYSNIMNFFKTEITLANGEIRKRPLIETNGETGEIVWDKGRDFATVRKVLSMPQVNIVKKTEVQTGGFSKESILPKRNSDKLIARKKDWDPKKYGGFDSPTVAYSVLVVAKVEKGKSKKLKSVKELLGITIMERSSFEKNPIDFLEAKGYKEVKKDLIIKLPKYSLFELENGRKRMLASAGELQKGNELALPSKYVNFLYLASHYEKLKGSPEDNEQKQLFVEQHKHYLDEIIEQISEFSKRVILADANLDKVLSAYNKHRDKPIREQAENIIHLFTLTNLGAPAAFKYFDTTIDRKRYTSTKEVLDATLIHQSITGLYETRIDLSQLGGD

SEQ ID NO: 9 - protein, 1368 aa, Artificial Sequence; identical to SEQ ID NO: 7
  Synthetic

SEQ ID NO: 10 - protein, 1367 aa, Artificial Sequence
  Synthetic
DKKYSIGLAIGTNSVGWAVITDEYKVPSKKFKVLGNTDRHSIKKNLIGALLFDSGETAEATRLKRTARRRYTRRKNRICYLQEIFSNEMAKVDDSFFHRLEESFLVEEDKKHERHPIFGNIVDEVAYHEKYPTIYHLRKKLVDSTDKADLRLIYLALAHMIKFRGHFLIEGDLNPDNSDVDKLFIQLVQTYNQLFEENPINASGVDAKAILSARLSKSRRLENLIAQLPGEKKNGLFGNLIALSLGLTPNFKSNFDLAEDAKLQLSKDTYDDDLDNLLAQIGDQYADLFLAAKNLSDAILLSDILRVNTEITKAPLSASMIKRYDEHHQDLTLLKALVRQQLPEKYKEIFFDQSKNGYAGYIDGGASQEEFYKFIKPILEKMDGTEELLVKLNREDLLRKQRTFDNGSIPHQIHLGELHAILRRQEDFYPFLKDNREKIEKILTFRIPYYVGPLARGNSRFAWMTRKSEETITPWNFEEVVDKGASAQSFIERMTNFDKNLPNEKVLPKHSLLYEYFTVYNELTKVKYVTEGMRKPAFLSGEQKKAIVDLLFKTNRKVTVKQLKEDYFKKIECFDSVEISGVEDRFNASLGTYHDLLKIIKDKDFLDNEENEDILEDIVLTLTLFEDREMIEERLKTYAHLFDDKVMKQLKRRRYTGWGRLSRKLINGIRDKQSGKTILDFLKSDGFANRNFMQLIHDDSLTFKEDIQKAQVSGQGDSLHEHIANLAGSPAIKKGILQTVKVVDELVKVMGRHKPENIVIEMARENQTTQKGQKNSRERMKRIEEGIKELGSQILKEHPVENTQLQNEKLYLYYLQNGRDMYVDQELDINRLSDYDVDHIVPQSFLKDDSIDNKVLTRSDKNRGKSDNVPSEEVVKKMKNYWRQLLNAKLITQRKFDNLTKAERGGLSELDKAGFIKRQLVETRQITKHVAQILDSRMNTKYDENDKLIREVKVITLKSKLVSDFRKDFQFYKVREINNYHHAHDAYLNAVVGTALIKKYPKLESEFVYGDYKVYDVRKMIAKSEQEIGKATAKYFFYSNIMNFFKTEITLANGEIRKRPLIETNGETGEIVWDKGRDFATVRKVLSMPQVNIVKKTEVQTGGFSKESILPKRNSDKLIARKKDWDPKKYGGFDSPTVAYSVLVVAKVEKGKSKKLKSVKELLGITIMERSSFEKNPIDFLEAKGYKEVKKDLIIKLPKYSLFELENGRKRMLASAGELQKGNELALPSKYVNFLYLASHYEKLKGSPEDNEQKQLFVEQHKHYLDEIIEQISEFSKRVILADANLDKVLSAYNKHRDKPIREQAENIIHLFTLTNLGAPAAFKYFDTTIDRKRYTSTKEVLDATLIHQSITGLYETRIDLSQLGGD

SEQ ID NO: 11 - protein, 1367 aa, Artificial Sequence
  Synthetic
DKKYSIGLDIGTNSVGWAVITDEYKVPSKKFKVLGNTDRHSIKKNLIGALLFDSGETAEATRLKRTARRRYTRRKNRICYLQEIFSNEMAKVDDSFFHRLEESFLVEEDKKHERHPIFGNIVDEVAYHEKYPTIYHLRKKLVDSTDKADLRLIYLALAHMIKFRGHFLIEGDLNPDNSDVDKLFIQLVQTYNQLFEENPINASGVDAKAILSARLSKSRRLENLIAQLPGEKKNGLFGNLIALSLGLTPNFKSNFDLAEDAKLQLSKDTYDDDLDNLLAQIGDQYADLFLAAKNLSDAILLSDILRVNTEITKAPLSASMIKRYDEHHQDLTLLKALVRQQLPEKYKEIFFDQSKNGYAGYIDGGASQEEFYKFIKPILEKMDGTEELLVKLNREDLLRKQRTFDNGSIPHQIHLGELHAILRRQEDFYPFLKDNREKIEKILTFRIPYYVGPLARGNSRFAWMTRKSEETITPWNFEEVVDKGASAQSFIERMTNFDKNLPNEKVLPKHSLLYEYFTVYNELTKVKYVTEGMRKPAFLSGEQKKAIVDLLFKTNRKVTVKQLKEDYFKKIECFDSVEISGVEDRFNASLGTYHDLLKIIKDKDFLDNEENEDILEDIVLTLTLFEDREMIEERLKTYAHLFDDKVMKQLKRRRYTGWGRLSRKLINGIRDKQSGKTILDFLKSDGFANRNFMQLIHDDSLTFKEDIQKAQVSGQGDSLHEHIANLAGSPAIKKGILQTVKVVDELVKVMGRHKPENIVIEMARENQTTQKGQKNSRERMKRIEEGIKELGSQILKEHPVENTQLQNEKLYLYYLQNGRDMYVDQELDINRLSDYDVDHIVPQSFLKDDSIDNKVLTRSDKNRGKSDNVPSEEVVKKMKNYWRQLLNAKLITQRKFDNLTKAERGGLSELDKAGFIKRQLVETRQITKHVAQILDSRMNTKYDENDKLIREVKVITLKSKLVSDFRKDFQFYKVREINNYHHAHDAYLNAVVGTALIKKYPKLESEFVYGDYKVYDVRKMIAKSEQEIGKATAKYFFYSNIMNFFKTEITLANGEIRKRPLIETNGETGEIVWDKGRDFATVRKVLSMPQVNIVKKTEVQTGGFSKESILPKRNSDKLIARKKDWDPKKYGGFDSPTVAYSVLVVAKVEKGKSKKLKSVKELLGITIMERSSFEKNPIDFLEAKGYKEVKKDLIIKLPKYSLFELENGRKRMLASAGELQKGNELALPSKYVNFLYLASHYEKLKGSPEDNEQKQLFVEQHKHYLDEIIEQISEFSKRVILADANLDKVLSAYNKHRDKPIREQAENIIHLFTLTNLGAPAAFKYFDTTIDRKRYTSTKEVLDATLIHQSITGLYETRIDLSQLGGD

SEQ ID NO: 12 - protein, 1052 aa, Artificial Sequence
  Synthetic
KRNYILGLDIGITSVGYGIIDYETRDVIDAGVRLFKEANVENNEGRRSKRGARRLKRRRRHRIQRVKKLLFDYNLLTDHSELSGINPYEARVKGLSQKLSEEEFSAALLHLAKRRGVHNVNEVEEDTGNELSTKEQISRNSKALEEKYVAELQLERLKKDGEVRGSINRFKTSDYVKEAKQLLKVQKAYHQLDQSFIDTYIDLLETRRTYYEGPGEGSPFGWKDIKEWYEMLMGHCTYFPEELRSVKYAYNADLYNALNDLNNLVITRDENEKLEYYEKFQIIENVFKQKKKPTLKQIAKEILVNEEDIKGYRVTSTGKPEFTNLKVYHDIKDITARKEIIENAELLDQIAKILTIYQSSEDIQEELTNLNSELTQEEIEQISNLKGYTGTHNLSLKAINLILDELWHTNDNQIAIFNRLKLVPKKVDLSQQKEIPTTLVDDFILSPVVKRSFIQSIKVINAIIKKYGLPNDIIIELAREKNSKDAQKMINEMQKRNRQTNERIEEIIRTTGKENAKYLIEKIKLHDMQEGKCLYSLEAIPLEDLLNNPFNYEVDHIIPRSVSFDNSFNNKVLVKQEENSKKGNRTPFQYLSSSDSKISYETFKKHILNLAKGKGRISKTKKEYLLEERDINRFSVQKDFINRNLVDTRYATRGLMNLLRSYFRVNNLDVKVKSINGGFTSFLRRKWKFKKERNKGYKHHAEDALIIANADFIFKEWKKLDKAKKVMENQMFEEKQAESMPEIETEQEYKEIFITPHQIKHIKDFKDYKYSHRVDKKPNRELINDTLYSTRKDDKGNTLIVNNLNGLYDKDNDKLKKLINKSPEKLLMYHHDPQTYQKLKLIMEQYGDEKNPLYKYYEETGNYLTKYSKKDNGPVIKKIKYYGNKLNAHLDITDDYPNSRNKVVKLSLKPYRFDVYLDNGVYKFVTVKNLDVIKKENYYEVNSKCYEEAKKLKKISNQAEFIASFYNNDLIKINGELYRVIGVNNDLLNRIEVNMIDITYREYLENMNDKRPPRIIKTIASKTQSIKKYSTDILGNLYEVKSKKHPQIIKKG

SEQ ID NO: 13 - protein, 1052 aa, Artificial Sequence
  Synthetic
KRNYILGLDIGITSVGYGIIDYETRDVIDAGVRLFKEANVENNEGRRSKRGARRLKRRRRHRIQRVKKLLFDYNLLTDHSELSGINPYEARVKGLSQKLSEEEFSAALLHLAKRRGVHNVNEVEEDTGNELSTKEQISRNSKALEEKYVAELQLERLKKDGEVRGSINRFKTSDYVKEAKQLLKVQKAYHQLDQSFIDTYIDLLETRRTYYEGPGEGSPFGWKDIKEWYEMLMGHCTYFPEELRSVKYAYNADLYNALNDLNNLVITRDENEKLEYYEKFQIIENVFKQKKKPTLKQIAKEILVNEEDIKGYRVTSTGKPEFTNLKVYHDIKDITARKEIIENAELLDQIAKILTIYQSSEDIQEELTNLNSELTQEEIEQISNLKGYTGTHNLSLKAINLILDELWHTNDNQIAIFNRLKLVPKKVDLSQQKEIPTTLVDDFILSPVVKRSFIQSIKVINAIIKKYGLPNDIIIELAREKNSKDAQKMINEMQKRNRQTNERIEEIIRTTGKENAKYLIEKIKLHDMQEGKCLYSLEAIPLEDLLNNPFNYEVDHIIPRSVSFDNSFNNKVLVKQEEASKKGNRTPFQYLSSSDSKISYETFKKHILNLAKGKGRISKTKKEYLLEERDINRFSVQKDFINRNLVDTRYATRGLMNLLRSYFRVNNLDVKVKSINGGFTSFLRRKWKFKKERNKGYKHHAEDALIIANADFIFKEWKKLDKAKKVMENQMFEEKQAESMPEIETEQEYKEIFITPHQIKHIKDFKDYKYSHRVDKKPNRELINDTLYSTRKDDKGNTLIVNNLNGLYDKDNDKLKKLINKSPEKLLMYHHDPQTYQKLKLIMEQYGDEKNPLYKYYEETGNYLTKYSKKDNGPVIKKIKYYGNKLNAHLDITDDYPNSRNKVVKLSLKPYRFDVYLDNGVYKFVTVKNLDVIKKENYYEVNSKCYEEAKKLKKISNQAEFIASFYNNDLIKINGELYRVIGVNNDLLNRIEVNMIDITYREYLENMNDKRPPRIIKTIASKTQSIKKYSTDILGNLYEVKSKKHPQIIKKG

SEQ ID NO: 14 - protein, 1052 aa, Artificial Sequence
  Synthetic
KRNYILGLDIGITSVGYGIIDYETRDVIDAGVRLFKEANVENNEGRRSKRGARRLKRRRRHRIQRVKKLLFDYNLLTDHSELSGINPYEARVKGLSQKLSEEEFSAALLHLAKRRGVHNVNEVEEDTGNELSTKEQISRNSKALEEKYVAELQLERLKKDGEVRGSINRFKTSDYVKEAKQLLKVQKAYHQLDQSFIDTYIDLLETRRTYYEGPGEGSPFGWKDIKEWYEMLMGHCTYFPEELRSVKYAYNADLYNALNDLNNLVITRDENEKLEYYEKFQIIENVFKQKKKPTLKQIAKEILVNEEDIKGYRVTSTGKPEFTNLKVYHDIKDITARKEIIENAELLDQIAKILTIYQSSEDIQEELTNLNSELTQEEIEQISNLKGYTGTHNLSLKAINLILDELWHTNDNQIAIFNRLKLVPKKVDLSQQKEIPTTLVDDFILSPVVKRSFIQSIKVINAIIKKYGLPNDIIIELAREKNSKDAQKMINEMQKRNRQTNERIEEIIRTTGKENAKYLIEKIKLHDMQEGKCLYSLEAIPLEDLLNNPFNYEVDHIIPRSVSFDNSFNNKVLVKQEEASKKGNRTPFQYLSSSDSKISYETFKKHILNLAKGKGRISKTKKEYLLEERDINRFSVQKDFINRNLVDTRYATRGLMNLLRSYFRVNNLDVKVKSINGGFTSFLRRKWKFKKERNKGYKHHAEDALIIANADFIFKEWKKLDKAKKVMENQMFEEKQAESMPEIETEQEYKEIFITPHQIKHIKDFKDYKYSHRVDKKPNRKLINDTLYSTRKDDKGNTLIVNNLNGLYDKDNDKLKKLINKSPEKLLMYHHDPQTYQKLKLIMEQYGDEKNPLYKYYEETGNYLTKYSKKDNGPVIKKIKYYGNKLNAHLDITDDYPNSRNKVVKLSLKPYRFDVYLDNGVYKFVTVKNLDVIKKENYYEVNSKCYEEAKKLKKISNQAEFIASFYKNDLIKINGELYRVIGVNNDLLNRIEVNMIDITYREYLENMNDKRPPHIIKTIASKTQSIKKYSTDILGNLYEVKSKKHPQIIKKG

SEQ ID NO: 15 - protein, 1367 aa, Artificial Sequence; identical to SEQ ID NO: 11
  Synthetic

SEQ ID NO: 16 - protein, 1367 aa, Artificial Sequence; identical to SEQ ID NO: 10
  Synthetic

SEQ ID NO: 17 - protein, 1367 aa, Artificial Sequence
  Synthetic
DKKYSIGLAIGTNSVGWAVITDEYKVPSKKFKVLGNTDRHSIKKNLIGALLFDSGETAEATRLKRTARRRYTRRKNRICYLQEIFSNEMAKVDDSFFHRLEESFLVEEDKKHERHPIFGNIVDEVAYHEKYPTIYHLRKKLVDSTDKADLRLIYLALAHMIKFRGHFLIEGDLNPDNSDVDKLFIQLVQTYNQLFEENPINASGVDAKAILSARLSKSRRLENLIAQLPGEKKNGLFGNLIALSLGLTPNFKSNFDLAEDAKLQLSKDTYDDDLDNLLAQIGDQYADLFLAAKNLSDAILLSDILRVNTEITKAPLSASMIKRYDEHHQDLTLLKALVRQQLPEKYKEIFFDQSKNGYAGYIDGGASQEEFYKFIKPILEKMDGTEELLVKLNREDLLRKQRTFDNGSIPHQIHLGELHAILRRQEDFYPFLKDNREKIEKILTFRIPYYVGPLARGNSRFAWMTRKSEETITPWNFEEVVDKGASAQSFIERMTNFDKNLPNEKVLPKHSLLYEYFTVYNELTKVKYVTEGMRKPAFLSGEQKKAIVDLLFKTNRKVTVKQLKEDYFKKIECFDSVEISGVEDRFNASLGTYHDLLKIIKDKDFLDNEENEDILEDIVLTLTLFEDREMIEERLKTYAHLFDDKVMKQLKRRRYTGWGRLSRKLINGIRDKQSGKTILDFLKSDGFANRNFMQLIHDDSLTFKEDIQKAQVSGQGDSLHEHIANLAGSPAIKKGILQTVKVVDELVKVMGRHKPENIVIEMARENQTTQKGQKNSRERMKRIEEGIKELGSQILKEHPVENTQLQNEKLYLYYLQNGRDMYVDQELDINRLSDYDVDHIVPQSFLKDDSIDNKVLTRSDKNRGKSDNVPSEEVVKKMKNYWRQLLNAKLITQRKFDNLTKAERGGLSELDKAGFIKRQLVETRQITKHVAQILDSRMNTKYDENDKLIREVKVITLKSKLVSDFRKDFQFYKVREINNYHHAHDAYLNAVVGTALIKKYPKLESEFVYGDYKVYDVRKMIAKSEQEIGKATAKYFFYSNIMNFFKTEITLANGEIRKRPLIETNGETGEIVWDKGRDFATVRKVLSMPQVNIVKKTEVQTGGFSKESILPKRNSDKLIARKKDWDPKKYGGFESPTVAYSVLVVAKVEKGKSKKLKSVKELLGITIMERSSFEKNPIDFLEAKGYKEVKKDLIIKLPKYSLFELENGRKRMLASAGELQKGNELALPSKYVNFLYLASHYEKLKGSPEDNEQKQLFVEQHKHYLDEIIEQISEFSKRVILADANLDKVLSAYNKHRDKPIREQAENIIHLFTLTNLGAPAAFKYFDTTIDRKQYRSTKEVLDATLIHQSITGLYETRIDLSQLGGD

SEQ ID NO: 18 - protein, 1367 aa, Artificial Sequence
  Synthetic
DKKYSIGLAIGTNSVGWAVITDEYKVPSKKFKVLGNTDRHSIKKNLIGALLFDSGETAEATRLKRTARRRYTRRKNRICYLQEIFSNEMAKVDDSFFHRLEESFLVEEDKKHERHPIFGNIVDEVAYHEKYPTIYHLRKKLVDSTDKADLRLIYLALAHMIKFRGHFLIEGDLNPDNSDVDKLFIQLVQTYNQLFEENPINASGVDAKAILSARLSKSRRLENLIAQLPGEKKNGLFGNLIALSLGLTPNFKSNFDLAEDAKLQLSKDTYDDDLDNLLAQIGDQYADLFLAAKNLSDAILLSDILRVNTEITKAPLSASMIKRYDEHHQDLTLLKALVRQQLPEKYKEIFFDQSKNGYAGYIDGGASQEEFYKFIKPILEKMDGTEELLVKLNREDLLRKQRTFDNGSIPHQIHLGELHAILRRQEDFYPFLKDNREKIEKILTFRIPYYVGPLARGNSRFAWMTRKSEETITPWNFEEVVDKGASAQSFIERMTNFDKNLPNEKVLPKHSLLYEYFTVYNELTKVKYVTEGMRKPAFLSGEQKKAIVDLLFKTNRKVTVKQLKEDYFKKIECFDSVEISGVEDRFNASLGTYHDLLKIIKDKDFLDNEENEDILEDIVLTLTLFEDREMIEERLKTYAHLFDDKVMKQLKRRRYTGWGRLSRKLINGIRDKQSGKTILDFLKSDGFANRNFMQLIHDDSLTFKEDIQKAQVSGQGDSLHEHIANLAGSPAIKKGILQTVKVVDELVKVMGRHKPENIVIEMARENQTTQKGQKNSRERMKRIEEGIKELGSQILKEHPVENTQLQNEKLYLYYLQNGRDMYVDQELDINRLSDYDVDHIVPQSFLKDDSIDNKVLTRSDKNRGKSDNVPSEEVVKKMKNYWRQLLNAKLITQRKFDNLTKAERGGLSELDKAGFIKRQLVETRQITKHVAQILDSRMNTKYDENDKLIREVKVITLKSKLVSDFRKDFQFYKVREINNYHHAHDAYLNAVVGTALIKKYPKLESEFVYGDYKVYDVRKMIAKSEQEIGKATAKYFFYSNIMNFFKTEITLANGEIRKRPLIETNGETGEIVWDKGRDFATVRKVLSMPQVNIVKKTEVQTGGFSKESILPKRNSDKLIARKKDWDPKKYGGFVSPTVAYSVLVVAKVEKGKSKKLKSVKELLGITIMERSSFEKNPIDFLEAKGYKEVKKDLIIKLPKYSLFELENGRKRMLASAGELQKGNELALPSKYVNFLYLASHYEKLKGSPEDNEQKQLFVEQHKHYLDEIIEQISEFSKRVILADANLDKVLSAYNKHRDKPIREQAENIIHLFTLTNLGAPAAFKYFDTTIDRKQYRSTKEVLDATLIHQSITGLYETRIDLSQLGGD

SEQ ID NO: 19 - protein, 1367 aa, Artificial Sequence
  Synthetic
DKKYSIGLAIGTNSVGWAVITDEYKVPSKKFKVLGNTDRHSIKKNLIGALLFDSGETAEATRLKRTARRRYTRRKNRICYLQEIFSNEMAKVDDSFFHRLEESFLVEEDKKHERHPIFGNIVDEVAYHEKYPTIYHLRKKLVDSTDKADLRLIYLALAHMIKFRGHFLIEGDLNPDNSDVDKLFIQLVQTYNQLFEENPINASGVDAKAILSARLSKSRRLENLIAQLPGEKKNGLFGNLIALSLGLTPNFKSNFDLAEDAKLQLSKDTYDDDLDNLLAQIGDQYADLFLAAKNLSDAILLSDILRVNTEITKAPLSASMIKRYDEHHQDLTLLKALVRQQLPEKYKEIFFDQSKNGYAGYIDGGASQEEFYKFIKPILEKMDGTEELLVKLNREDLLRKQRTFDNGSIPHQIHLGELHAILRRQEDFYPFLKDNREKIEKILTFRIPYYVGPLARGNSRFAWMTRKSEETITPWNFEEVVDKGASAQSFIERMTNFDKNLPNEKVLPKHSLLYEYFTVYNELTKVKYVTEGMRKPAFLSGEQKKAIVDLLFKTNRKVTVKQLKEDYFKKIECFDSVEISGVEDRFNASLGTYHDLLKIIKDKDFLDNEENEDILEDIVLTLTLFEDREMIEERLKTYAHLFDDKVMKQLKRRRYTGWGRLSRKLINGIRDKQSGKTILDFLKSDGFANRNFMQLIHDDSLTFKEDIQKAQVSGQGDSLHEHIANLAGSPAIKKGILQTVKVVDELVKVMGRHKPENIVIEMARENQTTQKGQKNSRERMKRIEEGIKELGSQILKEHPVENTQLQNEKLYLYYLQNGRDMYVDQELDINRLSDYDVDHIVPQSFLKDDSIDNKVLTRSDKNRGKSDNVPSEEVVKKMKNYWRQLLNAKLITQRKFDNLTKAERGGLSELDKAGFIKRQLVETRQITKHVAQILDSRMNTKYDENDKLIREVKVITLKSKLVSDFRKDFQFYKVREINNYHHAHDAYLNAVVGTALIKKYPKLESEFVYGDYKVYDVRKMIAKSEQEIGKATAKYFFYSNIMNFFKTEITLANGEIRKRPLIETNGETGEIVWDKGRDFATVRKVLSMPQVNIVKKTEVQTGGFSKESILPKRNSDKLIARKKDWDPKKYGGFVSPTVAYSVLVVAKVEKGKSKKLKSVKELLGITIMERSSFEKNPIDFLEAKGYKEVKKDLIIKLPKYSLFELENGRKRMLASARELQKGNELALPSKYVNFLYLASHYEKLKGSPEDNEQKQLFVEQHKHYLDEIIEQISEFSKRVILADANLDKVLSAYNKHRDKPIREQAENIIHLFTLTNLGAPAAFKYFDTTIDRKEYRSTKEVLDATLIHQSITGLYETRIDLSQLGGD

SEQ ID NO: 20 - protein, 1367 aa, Artificial Sequence
  Synthetic
DKKYSIGLAIGTNSVGWAVITDEYKVPSKKFKVLGNTDRHSIKKNLIGALLFDSGETAEATRLKRTARRRYTRRKNRICYLQEIFSNEMAKVDDSFFHRLEESFLVEEDKKHERHPIFGNIVDEVAYHEKYPTIYHLRKKLVDSTDKADLRLIYLALAHMIKFRGHFLIEGDLNPDNSDVDKLFIQLVQTYNQLFEENPINASGVDAKAILSARLSKSRRLENLIAQLPGEKKNGLFGNLIALSLGLTPNFKSNFDLAEDAKLQLSKDTYDDDLDNLLAQIGDQYADLFLAAKNLSDAILLSDILRVNTEITKAPLSASMIKRYDEHHQDLTLLKALVRQQLPEKYKEIFFDQSKNGYAGYIDGGASQEEFYKFIKPILEKMDGTEELLVKLNREDLLRKQRTFDNGSIPHQIHLGELHAILRRQEDFYPFLKDNREKIEKILTFRIPYYVGPLARGNSRFAWMTRKSEETITPWNFEEVVDKGASAQSFIERMTAFDKNLPNEKVLPKHSLLYEYFTVYNELTKVKYVTEGMRKPAFLSGEQKKAIVDLLFKTNRKVTVKQLKEDYFKKIECFDSVEISGVEDRFNASLGTYHDLLKIIKDKDFLDNEENEDILEDIVLTLTLFEDREMIEERLKTYAHLFDDKVMKQLKRRRYTGWGALSRKLINGIRDKQSGKTILDFLKSDGFANRNFMALIHDDSLTFKEDIQKAQVSGQGDSLHEHIANLAGSPAIKKGILQTVKVVDELVKVMGRHKPENIVIEMARENQTTQKGQKNSRERMKRIEEGIKELGSQILKEHPVENTQLQNEKLYLYYLQNGRDMYVDQELDINRLSDYDVDHIVPQSFLKDDSIDNKVLTRSDKNRGKSDNVPSEEVVKKMKNYWRQLLNAKLITQRKFDNLTKAERGGLSELDKAGFIKRQLVETRAITKHVAQILDSRMNTKYDENDKLIREVKVITLKSKLVSDFRKDFQFYKVREINNYHHAHDAYLNAVVGTALIKKYPKLESEFVYGDYKVYDVRKMIAKSEQEIGKATAKYFFYSNIMNFFKTEITLANGEIRKRPLIETNGETGEIVWDKGRDFATVRKVLSMPQVNIVKKTEVQTGGFSKESILPKRNSDKLIARKKDWDPKKYGGFDSPTVAYSVLVVAKVEKGKSKKLKSVKELLGITIMERSSFEKNPIDFLEAKGYKEVKKDLIIKLPKYSLFELENGRKRMLASAGELQKGNELALPSKYVNFLYLASHYEKLKGSPEDNEQKQLFVEQHKHYLDEIIEQISEFSKRVILADANLDKVLSAYNKHRDKPIREQAENIIHLFTLTNLGAPAAFKYFDTTIDRKRYTSTKEVLDATLIHQSITGLYETRIDLSQLGGD

SEQ ID NO: 21 - protein, 1368 aa, Artificial Sequence; identical to SEQ ID NO: 5
  Synthetic

SEQ ID NO: 22 - protein, 1368 aa, Artificial Sequence; identical to SEQ ID NO: 7
  Synthetic

SEQ ID NO: 23 - protein, 1209 aa, Streptococcus pyogenes
MDKKYSIGLDIGTNSVGWAVITDEYKVPSKKFKVLGNTDRHSIKKNLIGALLFDSGETAEATRLKRTARRRYTRRKNRICYLQEIFSNEMAKVDDSFFHRLEESFLVEEDKKHERHPIFGNIVDEVAYHEKYPTIYHLRKKLVDSTDKADLRLIYLALAHMIKFRGHFLIEGDLNPDNSDVDKLFIQLVQTYNQLFEENPINASGVDAKAILSARLSKSRRLENLIAQLPGEKKNGLFGNLIALSLGLTPNFKSNFDLAEDAKLQLSKDTYDDDLDNLLAQIGDQYADLFLAAKNLSDAILLSDILRVNTEITKAPLSASMIKRYDEHHQDLTLLKALVRQQLPEKYKEIFFDQSKNGYAGYIDGGASQEEFYKFIKPILEKMDGTEELLVKLNREDLLRKQRTFDNGSIPHQIHLGELHAILRRQEDFYPFLKDNREKIEKILTFRIPYYVGPLARGNSRFAWMTRKSEETITPWNFEEVVDKGASAQSFIERMTNFDKNLPNEKVLPKHSLLYEYFTVYNELTKVKYVTEGMRKPAFLSGEQKKAIVDLIQKAQVSGQGDSLHEHIANLAGSPAIKKGILQTVKVVDELVKVMGRHKPENIVIEMARENQTTQKGQKNSRERMKRIEEGIKELGSQILKEHPVENTQLQNEKLYLYYLQNGRDMYVDQELDINRLSDYDVDHIVPQSFLKDDSIDNKVLTRSDKNRGKSDNVPSEEVVKKMKNYWRQLLNAKLITQRKFDNLTKAERGGLSELDKAGFIKRQLVETRQITKHVAQILDSRMNTKYDENDKLIREVKVITLKSKLVSDFRKDFQFYKVREINNYHHAHDAYLNAVVGTALIKKYPKLESEFVYGDYKVYDVRKMIAKSEQEIGKATAKYFFYSNIMNFFKTEITLANGEIRKRPLIETNGETGEIVWDKGRDFATVRKVLSMPQVNIVKKTEVQTGGFSKESILPKRNSDKLIARKKDWDPKKYGGFDSPTVAYSVLVVAKVEKGKSKKLKSVKELLGITIMERSSFEKNPIDFLEAKGYKEVKKDLIIKLPKYSLFELENGRKRMLASAGELQKGNELALPSKYVNFLYLASHYEKLKGSPEDNEQKQLFVEQHKHYLDEIIEQISEFSKRVILADANLDKVLSAYNKHRDKPIREQAENIIHLFTLTNLGAPAAFKYFDTTIDRKRYTSTKEVLDATLIHQSITGLYETRIDLSQL

SEQ ID NO: 24 - protein, 1211 aa, Streptococcus gallolyticus
MTKKNYSIGLDIGTNSVGWAVITDDYKVPAKKMKVLGNTDKKYIKKNLLGALLFDSGETAEATRLKRTARRRYTRRKNRLRYLQEIFANEIAKVDESFFQRLDESFLTDDDKTFDSHPIFGNKAEEDAYHQKFPTIYHLRKHLADSSEKADLRLVYLALAHMIKFRGHFLIEGELNAENTDVQKIFADFVGVYNRTFDDSHLSEITVDVASILTEKISKSRRLENLIKYYPTEKKNTLFGNLIALALGLQPNFKTNFKLSEDAKLQFSKDTYEEDLEELLGKIGDDYADLFTSAKNLYDAILLSGILTVDDNSTKAPLSASMIKRYVEHHEDLEKLKEFIKANKSELYHDIFKDKNKNGYAGYIENGVKQDEFYKYLKNILSKIKIDGSDYFLDKIEREDFLRKQRTFDNGSIPHQIHLQEMHAILRRQGDYYPFLKEKQDRIEKILTFRIPYYVGPLVRKDSRFAWAEYRSDEKITPWNFDKVIDKEKSAEKFITRMTLNDLYLPEEKVLPKHSHVYETYAVYNELTKIKYVNEQGKESFFDSNMKQEIFDHIQKSQVVGDVDDIEAVVHDLPGSPAIKKGILQSVKIVDELVKVMGGNPDNIVIEMARENQTTNRGRSQSQQRLKKLQNSLKELGSNILNEEKPSYIEDKVENSHLQNDQLFLYYIQNGKDMYTGDELDIDHLSDYDIDHIIPQAFIKDDSIDNRVLTSSAKNRGKSDDVPSLDIVRARKAEWVRLYKSGLISKRKFDNLTKAERGGLTEADKAGFIKRQLVETRQITKHVAQILDARFNTEHDENDKVIRDVKVITLKSNLVSQFRKDFEFYKVREINDYHHAHDAYLNAVVGTALLKKYPKLASEFVYGEYKKYDIRKFITNSSDKATAKYFFYSNLMNFFKTKVKYADGTVFERPIIETNADGEIAWNKQIDFEKVRKVLSYPQVNIVKKVETQTGGFSKESILPKGDSDKLIPRKTKKVYWDTKKYGGFDSPTVAYSVFVVADVEKGKAKKLKTVKELVGISIMERSFFEENPVEFLENKGYHNIREDKLIKLPKYSLFEFEGGRRRLLASASELQKGNEMVLPGYLVELLYHAHRADNFNSTEYLNYVSEHKKEFEKVLSCVEDFANLYVDVEKNLSKIRAVADSMDNFSIEEISNSFINLLTLTALGAPADFNFLGEKIPRKRYTSTKECLNATLIHQSITGLYETRIDLSKL

SEQ ID NO: 25 - protein, 1212 aa, Streptococcus mitis
MKKGYSIGLDIGTNSVGFAVITDDYKVPSKKMKVLGNTDKRFIKKNLIGALLFDEGTTAEARRLKRTARRRYTRRKNRLRYLQEIFSEEMSKVDSSFFHRLDDSFLIPEDKRESKYPIFATLTEEKEYHKQFPTIYHLRKQLADSKEKTDLRLIYLALAHMIKYRGHFLYEEAFDIKNNDIQKIFNEFISIYDNTFEGSSLSGQNAQVEAIFTDKISKSAKRERVLKLFPDEKSTGLFSEFLKLIVGNQADFKKHFDLEDKAPLQFSKDTYDEDLENLLGQIGDDFTDLFVSAKKLYDAILLSGILTVTDPSTKAPLSASMIERYENHQNDLAALKQFIKNNLPEKYDEVFSDQSKDGYAGYIDGKTTQETFYKYIKNLLSKFEGTDYFLDKIEREDFLRKQRTFDNGSIPHQIHLQEMNAILRRQGEYYPFLKDNKEKIEKILTFRIPYYVGPLARGNRDFAWLTRNSDEAIRPWNFEEIVDKASSAEDFINKMTNYDLYLPEEKVLPKHSLLYETFAVYNELTKVKFIAEGLRDYQFLDSGQKKQIVNQIQKAQVIGKTDDVKQVVQELSGSPAIKKGILQSIKIVDELVKVMGHAPESIVIEMARENQTTARGKKNSQQRYKRIEDSLKILASGLDSNILKENPTDNNQLQNDRLFLYYLQNGKDMYTGEALDINQLSSYDIDHIIPQAFIKDDSLDNRVLTSSKDNRGKSDNVPSIEVVQKRKAFWQQLLDSKLISERKFNNLTKAERGGLDERDKVGFIKRQLVETRQITKHVAQILDARYNTEVNEKDKKNRTVKIITLKSNLVSNFRKEFRLYKVREINDYHHAHDAYLNAVVAKAILKKYPKLEPEFVYGEYQKYDLKRYISRSKDPKEVEKATEKYFFYSNLLNFFKEEVHYADGTIVKRENIEYSKDTGEIAWNKEKDFAIIKKVLSLPQVNIVKKREVQTGGFSKESILPKGNSDKLIPRKTKDILLDTTKYGGFDSPVIAYSILLIADIEKGKAKKLKTVKTLVGITIMEKAAFEENPITFLENKGYHNVRKENILCLPKYSLFELENGRRRLLASAKELQKGNEIVLPVYLTTLLYHSKNVHKLDEPGHLEYIQKHRNEFKDLLNLVSEFSQKYVLADANLEKIKSLYADNEQADIEILANSFINLLTFTALGAPAAFKFFGKDIDRKRYTTVSEILNATLIHQSITGLYETWIDLSKL

SEQ ID NO: 26 - protein, 916 aa, Staphylococcus Aureus
GSHMKRNYILGLDIGITSVGYGIIDYETRDVIDAGVRLFKEANVENNEGRRSKRGARRLKRRRRHRIQRVKKLLFDYNLLTDHSELSGINPYEARVKGLSQKLSEEEFSAALLHLAKRRGVHNVNEVEEDTGNELSTKEQISRNSKALEEKYVAELQLERLKKDGEVRGSINRFKTSDYVKEAKQLLKVQKAYHQLDQSFIDTYIDLLETRRTYYEGPGEGSPFGWKDIKEWYEMLMGHCTYFPEELRSVKYAYNADLYNALNDLNNLVITRDENEKLEYYEKFQIIENKKVDLSQQKEIPTTLVDDFILSPVVKRSFIQSIKVINAIIKKYGLPNDIIIELAREKNSKDAQKMINEMQKRNRQTNERIEEIIRTTGKENAKYLIEKIKLHDMQEGKCLYSLEAIPLEDLLNNPFNYEVDHIIPRSVSFDNSFNNKVLVKQEEASKKGNRTPFQYLSSSDSKISYETFKKHILNLAKGKGRISKTKKEYLLEERDINRFSVQKDFINRNLVDTRYATRGLMNLLRSYFRVNNLDVKVKSINGGFTSFLRRKWKFKKERNKGYKHHAEDALIIANADFIFKEWKKLDKAKKVMENQMFEEKQAESMPEIETEQEYKEIFITPHQIKHIKDFKDYKYSHRVDKKPNRELINDTLYSTRKDDKGNTLIVNNLNGLYDKDNDKLKKLINKSPEKLLMYHHDPQTYQKLKLIMEQYGDEKNPLYKYYEETGNYLTKYSKKDNGPVIKKIKYYGNKLNAHLDITDDYPNSRNKVVKLSLKPYRFDVYLDNGVYKFVTVKNLDVIKKENYYEVNSKAYEEAKKLKKISNQAEFIASFYNNDLIKINGELYRVIGVNNDLLNRIEVNMIDITYREYLENMNDKRPPRIIKTIASKTQSIKKYSTDILGNLYEVKSKKHPQIIKK

SEQ ID NO: 27 - protein, 345 aa, Sulfolobus islandicus
MEVPLYNIFGDNYIIQVATEAENSTIYNNKVEIDDEELRNVLNLAYKIAKNNEDAAAERRGKAKKKKGEEGETTTSNIILPLSGNDKNPWTETLKCYNFPTTVALSEVFKNFSQVKECEEVSAPSFVKPEFYEFGRSPGMVERTRRVKLEVEPHYLIIAAAGWVLTRLGKAKVSEGDYVGVNVFTPTRGILYSLIQNVNGIVPGIKPETAFGLWIARKVVSSVTNPNVSVVRIYTISDAVGQNPTTINGGFSIDLTKLLEKRYLLSERLEAIARNALSISSNMRERYIVLANYIYEYLTGSKRLEDLLYFANRDLIMNLNSDDGKVRDLKLISAYVNGELIRGEG

SEQ ID NO: 28 - protein, 345 aa, Sulfolobus islandicus
MEVPLYNIFGDNYIIQVATEAENSTIYNNKVEIDDEELRNVLNLAYKIAKNNEDAAAERRGKAKKKKGEEGETTTSNIILPLSGNDKNPWTETLKCYNFPTTVALSEVFKNFSQVKECEEVSAPSFVKPEFYKFGRSPGMVERTRRVKLEVEPHYLIMAAAGWVLTRLGKAKVSEGDYVGVNVFTPTRGILYSLIQNVNGIVPGIKPETAFGLWIARKVVSSVTNPNVSVVSIYTISDAVGQNPTTINGGFSIDLTKLLEKRDLLSERLEAIARNALSISSNMRERYIVLANYIYEYLTGSKRLEDLLYFANRDLIMNLNSDDGKVRDLKLISAYVNGELIRGEG

SEQ ID NO: 29 - protein, 1210 aa, Unknown
  uncultured Parcubacteria group bacterium
MSKRHPRISGVKGYRLHAQRLEYTGKSGAMRTIKYPLYSSPSGGRTVPREIVSAINDDYVGLYGLSNFDDLYNAEKRNEEKVYSVLDFWYDCVQYGAVFSYTAPGLLKNVAEVRGGSYELTKTLKGSHLYDELQIDKVIKFLNKKEISRANGSLDKLKKDIIDCFKAEYRERHKDQCNKLADDIKNAKKDAGASLGERQKKLFRDFFGISEQSENDKPSFTNPLNLTCCLLPFDTVNNNRNRGEVLFNKLKEYAQKLDKNEGSLEMWEYIGIGNSGTAFSNFLGEGFLGRLRENKITELKKAMMDITDAWRGQEQEEELEKRLRILAALTIKLREPKFDNHWGGYRSDINGKLSSWLQNYINQTVKIKEDLKGHKKDLKKAKEMINRFGESDTKEEAVVSSLLESIEKIVPDDSADDEKPDIPAIAIYRRFLSDGRLTLNRFVQREDVQEALIKERLEAEKKKKPKKRKKKSDAEDEKETIDFKELFPHLAKPLKLVPNFYGDSKRELYKKYKNAAIYTDALWKAVEKIYKSAFSSSLKNSFFDTDFDKDFFIKRLQKIFSVYRRFNTDKWKPIVKNSFAPYCDIVSLAENEVLYKPKQSRSRKSAAIDKNRVRLPSTENIAKAGIALARELSVAGFDWKDLLKKEEHEEYIDLIELHKTALALLLAVTETQLDISALDFVENGTVKDFMKTRDGNLVLEGRFLEMFSQSIVFSELRGLAGLMSRKEFITRSAIQTMNGKQAELLYIPHEFQSAKITTPKEMSRAFLDLAPAEFATSLEPESLSEKSLLKLKQMRYYPHYFGYELTRTGQGIDGGVAENALRLEKSPVKKREIKCKQYKTLGRGQNKIVLYVRSSYYQTQFLEWFLHRPKNVQTDVAVSGSFLIDEKKVKTRWNYDALTVALEPVSGSERVFVSQPFTIFPEKSAEEEGQRYLGIDIGEYGIAYTALEITGDSAKILDQNFISDPQLKTLREEVKGLKLDQRRGTFAMPSTKIARIRESLVHSLRNRIHHLALKHKAKIVYELEVSRFEEGKQKIKKVYATLKKADVYSEIDADKNLQTTVWGKLAVASEISASYTSQFCGACKKLWRAEMQVDETITTQELIGTVRVIKGGTLIDAIKDFMRPPIFDENDTPFPKYRDFCDKHHISKKMRGNSCLFICPFCRANADADIQASQTIALLRYVKEEKKVEDYFERFRKLKNIKVLGQMKKI

SEQ ID NO: 30 - protein, 1300 aa, Francisella novicida
MSIYQEFVNKYSLSKTLRFELIPQGKTLENIKARGLILDDEKRAKDYKKAKQIIDKYHQFFIEEILSSVCISEDLLQNYSDVYFKLKKSDDDNLQKDFKSAKDTIKKQISEYIKDSEKFKNLFNQNLIDAKKGQESDLILWLKQSKDNGIELFKANSDITDIDEALEIIKSFKGWTTYFKGFHENRKNVYSSNDIPTSIIYRIVDDNLPKFLENKAKYESLKDKAPEAINYEQIKKDLAEELTFDIDYKTSEVNQRVFSLDEVFEIANFNNYLNQSGITKFNTIIGGKFVNGENTKRKGINEYINLYSQQINDKTLKKYKMSVLFKQILSDTESKSFVIDKLEDDSDVVTTMQSFYEQIAAFKTVEEKSIKETLSLLFDDLKAQKLDLSKIYFKNDKSLTDLSQQVFDDYSVIGTAVLEYITQQIAPKNLDNPSKKEQELIAKKTEKAKYLSLETIKLALEEFNKHRDIDKQCRFEEILANFAAIPMIFDEIAQNKDNLAQISIKYQNQGKKDLLQASAEDDVKAIKDLLDQTNNLLHKLKIFHISQSEDKANILDKDEHFYLVFEECYFELANIVPLYNKIRNYITQKPYSDEKFKLNFENSTLANGWDKNKEPDNTAILFIKDDKYYLGVMNKKNNKIFDDKAIKENKGEGYKKIVYKLLPGANKMLPKVFFSAKSIKFYNPSEDILRIRNHSTHTKNGSPQKGYEKFEFNIEDCRKFIDFYKQSISKHPEWKDFGFRFSDTQRYNSIDEFYREVENQGYKLTFENISESYIDSVVNQGKLYLFQIYNKDFSAYSKGRPNLHTLYWKALFDERNLQDVVYKLNGEAELFYRKQSIPKKITHPAKEAIANKNKDNPKKESVFEYDLIKDKRFTEDKFFFHCPITINFKSSGANKFNDEINLLLKEKANDVHILSIDRGERHLAYYTLVDGKGNIIKQDTFNIIGNDRMKTNYHDKLAAIEKDRDSARKDWKKINNIKEMKEGYLSQVVHEIAKLVIEYNAIVVFEDLNFGFKRGRFKVEKQVYQKLEKMLIEKLNYLVFKDNEFDKTGGVLRAYQLTAPFETFKKMGKQTGIIYYVPAGFTSKICPVTGFVNQLYPKYESVSKSQEFFSKFDKICYNLDKGYFEFSFDYKNFGDKAAKGKWTIASFGSRLINFRNSDKNHNWDTREVYPTKELEKLLKDYSIEYGHGECIKAAICGESDKKFFAKLTSVLNTILQMRNSKTGTELDYLISPVADVNGNFFDSRQAPKNMPQDADANGAYHIGLKGLMLLGRIKNNQEGKKLNLVIKNEEYFEFVQNRNN

SEQ ID NO: 31 - protein, 1300 aa, Francisella novicida
MSIYQEFVNKYSLSKTLRFELIPQGKTLENIKARGLILDDEKRAKDYKKAKQIIDKYHQFFIEEILSSVCISEDLLQNYSDVYFKLKKSDDDNLQKDFKSAKDTIKKQISEYIKDSEKFKNLFNQNLIDAKKGQESDLILWLKQSKDNGIELFKANSDITDIDEALEIIKSFKGWTTYFKGFHENRKNVYSSNDIPTSIIYRIVDDNLPKFLENKAKYESLKDKAPEAINYEQIKKDLAEELTFDIDYKTSEVNQRVFSLDEVFEIANFNNYLNQSGITKFNTIIGGKFVNGENTKRKGINEYINLYSQQINDKTLKKYKMSVLFKQILSDTESKSFVIDKLEDDSDVVTTMQSFYEQIAAFKTVEEKSIKETLSLLFDDLKAQKLDLSKIYFKNDKSLTDLSQQVFDDYSVIGTAVLEYITQQIAPKNLDNPSKKEQELIAKKTEKAKYLSLETIKLALEEFNKHRDIDKQCRFEEILANFAAIPMIFDEIAQNKDNLAQISIKYQNQGKKDLLQASAEDDVKAIKDLLDQTNNLLHKLKIFHISQSEDKANILDKDEHFYLVFEECYFELANIVPLYNKIRNYITQKPYSDEKFKLNFENSTLANGWDKNKEPDNTAILFIKDDKYYLGVMNKKNNKIFDDKAIKENKGEGYKKIVYKLLPGANKMLPKVFFSAKSIKFYNPSEDILRIRNHSTHTKNGSPQKGYEKFEFNIEDCRKFIDFYKQSISKHPEWKDFGFRFSDTQRYNSIDEFYREVENQGYKLTFENISESYIDSVVNQGKLYLFQIYNKDFSAYSKGRPNLHTLYWKALFDERNLQDVVYKLNGEAELFYRKQSIPKKITHPAKEAIANKNKDNPKKESVFEYDLIKDKRFTEDKFFFHCPITINFKSSGANKFNDEINLLLKEKANDVHILSIARGERHLAYYTLVDGKGNIIKQDTFNIIGNDRMKTNYHDKLAAIEKDRDSARKDWKKINNIKEMKEGYLSQVVHEIAKLVIEYNAIVVFEDLNFGFKRGRFKVEKQVYQKLEKMLIEKLNYLVFKDNEFDKTGGVLRAYQLTAPFETFKKMGKQTGIIYYVPAGFTSKICPVTGFVNQLYPKYESVSKSQEFFSKFDKICYNLDKGYFEFSFDYKNFGDKAAKGKWTIASFGSRLINFRNSDKNHNWDTREVYPTKELEKLLKDYSIEYGHGECIKAAICGESDKKFFAKLTSVLNTILQMRNSKTGTELDYLISPVADVNGNFFDSRQAPKNMPQDADANGAYHIGLKGLMLLGRIKNNQEGKKLNLVIKNEEYFEFVQNRNN

SEQ ID NO: 32 - protein, 1300 aa, Francisella novicida
MSIYQEFVNKYSLSKTLRFELIPQGKTLENIKARGLILDDEKRAKDYKKAKQIIDKYHQFFIEEILSSVCISEDLLQNYSDVYFKLKKSDDDNLQKDFKSAKDTIKKQISEYIKDSEKFKNLFNQNLIDAKKGQESDLILWLKQSKDNGIELFKANSDITDIDEALEIIKSFKGWTTYFKGFHENRKNVYSSNDIPTSIIYRIVDDNLPKFLENKAKYESLKDKAPEAINYEQIKKDLAEELTFDIDYKTSEVNQRVFSLDEVFEIANFNNYLNQSGITKFNTIIGGKFVNGENTKRKGINEYINLYSQQINDKTLKKYKMSVLFKQILSDTESKSFVIDKLEDDSDVVTTMQSFYEQIAAFKTVEEKSIKETLSLLFDDLKAQKLDLSKIYFKNDKSLTDLSQQVFDDYSVIGTAVLEYITQQIAPKNLDNPSKKEQELIAKKTEKAKYLSLETIKLALEEFNKHRDIDKQCRFEEILANFAAIPMIFDEIAQNKDNLAQISIKYQNQGKKDLLQASAEDDVKAIKDLLDQTNNLLHKLKIFHISQSEDKANILDKDEHFYLVFEECYFELANIVPLYNKIRNYITQKPYSDEKFKLNFENSTLANGWDKNKEPDNTAILFIKDDKYYLGVMNKKNNKIFDDKAIKENKGEGYKKIVYKLLPGANKMLPKVFFSAKSIKFYNPSEDILRIRNHSTHTKNGSPQKGYEKFEFNIEDCRKFIDFYKQSISKHPEWKDFGFRFSDTQRYNSIDEFYREVENQGYKLTFENISESYIDSVVNQGKLYLFQIYNKDFSAYSKGRPNLHTLYWKALFDERNLQDVVYKLNGEAELFYRKQSIPKKITHPAKEAIANKNKDNPKKESVFEYDLIKDKRFTEDKFFFHCPITINFKSSGANKFNDEINLLLKEKANDVHILSIDRGERHLAYYTLVDGKGNIIKQDTFNIIGNDRMKTNYHDKLAAIEKDRDSARKDWKKINNIKEMKEGYLSQVVHEIAKLVIEYNAIVVFADLNFGFKRGRFKVEKQVYQKLEKMLIEKLNYLVFKDNEFDKTGGVLRAYQLTAPFETFKKMGKQTGIIYYVPAGFTSKICPVTGFVNQLYPKYESVSKSQEFFSKFDKICYNLDKGYFEFSFDYKNFGDKAAKGKWTIASFGSRLINFRNSDKNHNWDTREVYPTKELEKLLKDYSIEYGHGECIKAAICGESDKKFFAKLTSVLNTILQMRNSKTGTELDYLISPVADVNGNFFDSRQAPKNMPQDADANGAYHIGLKGLMLLGRIKNNQEGKKLNLVIKNEEYFEFVQNRNN

SEQ ID NO: 33 - protein, 1300 aa, Francisella novicida
MSIYQEFVNKYSLSKTLRFELIPQGKTLENIKARGLILDDEKRAKDYKKAKQIIDKYHQFFIEEILSSVCISEDLLQNYSDVYFKLKKSDDDNLQKDFKSAKDTIKKQISEYIKDSEKFKNLFNQNLIDAKKGQESDLILWLKQSKDNGIELFKANSDITDIDEALEIIKSFKGWTTYFKGFHENRKNVYSSNDIPTSIIYRIVDDNLPKFLENKAKYESLKDKAPEAINYEQIKKDLAEELTFDIDYKTSEVNQRVFSLDEVFEIANFNNYLNQSGITKFNTIIGGKFVNGENTKRKGINEYINLYSQQINDKTLKKYKMSVLFKQILSDTESKSFVIDKLEDDSDVVTTMQSFYEQIAAFKTVEEKSIKETLSLLFDDLKAQKLDLSKIYFKNDKSLTDLSQQVFDDYSVIGTAVLEYITQQIAPKNLDNPSKKEQELIAKKTEKAKYLSLETIKLALEEFNKHRDIDKQCRFEEILANFAAIPMIFDEIAQNKDNLAQISIKYQNQGKKDLLQASAEDDVKAIKDLLDQTNNLLHKLKIFHISQSEDKANILDKDEHFYLVFEECYFELANIVPLYNKIRNYITQKPYSDEKFKLNFENSTLANGWDKNKEPDNTAILFIKDDKYYLGVMNKKNNKIFDDKAIKENKGEGYKKIVYKLLPGANKMLPKVFFSAKSIKFYNPSEDILRIRNHSTHTKNGSPQKGYEKFEFNIEDCRKFIDFYKQSISKHPEWKDFGFRFSDTQRYNSIDEFYREVENQGYKLTFENISESYIDSVVNQGKLYLFQIYNKDFSAYSKGRPNLHTLYWKALFDERNLQDVVYKLNGEAELFYRKQSIPKKITHPAKEAIANKNKDNPKKESVFEYDLIKDKRFTEDKFFFHCPITINFKSSGANKFNDEINLLLKEKANDVHILSIDRGERHLAYYTLVDGKGNIIKQDTFNIIGNDRMKTNYHDKLAAIEKDRDSARKDWKKINNIKEMKEGYLSQVVHEIAKLVIEYNAIVVFEDLNFGFKRGRFKVEKQVYQKLEKMLIEKLNYLVFKDNEFDKTGGVLRAYQLTAPFETFKKMGKQTGIIYYVPAGFTSKICPVTGFVNQLYPKYESVSKSQEFFSKFDKICYNLDKGYFEFSFDYKNFGDKAAKGKWTIASFGSRLINFRNSDKNHNWDTREVYPTKELEKLLKDYSIEYGHGECIKAAICGESDKKFFAKLTSVLNTILQMRNSKTGTELDYLISPVADVNGNFFDSRQAPKNMPQDAAANGAYHIGLKGLMLLGRIKNNQEGKKLNLVIKNEEYFEFVQNRNN

SEQ ID NO: 34 - protein, 1300 aa, Francisella novicida
MSIYQEFVNKYSLSKTLRFELIPQGKTLENIKARGLILDDEKRAKDYKKAKQIIDKYHQFFIEEILSSVCISEDLLQNYSDVYFKLKKSDDDNLQKDFKSAKDTIKKQISEYIKDSEKFKNLFNQNLIDAKKGQESDLILWLKQSKDNGIELFKANSDITDIDEALEIIKSFKGWTTYFKGFHENRKNVYSSNDIPTSIIYRIVDDNLPKFLENKAKYESLKDKAPEAINYEQIKKDLAEELTFDIDYKTSEVNQRVFSLDEVFEIANFNNYLNQSGITKFNTIIGGKFVNGENTKRKGINEYINLYSQQINDKTLKKYKMSVLFKQILSDTESKSFVIDKLEDDSDVVTTMQSFYEQIAAFKTVEEKSIKETLSLLFDDLKAQKLDLSKIYFKNDKSLTDLSQQVFDDYSVIGTAVLEYITQQIAPKNLDNPSKKEQELIAKKTEKAKYLSLETIKLALEEFNKHRDIDKQCRFEEILANFAAIPMIFDEIAQNKDNLAQISIKYQNQGKKDLLQASAEDDVKAIKDLLDQTNNLLHKLKIFHISQSEDKANILDKDEHFYLVFEECYFELANIVPLYNKIRNYITQKPYSDEKFKLNFENSTLANGWDKNKEPDNTAILFIKDDKYYLGVMNKKNNKIFDDKAIKENKGEGYKKIVYKLLPGANKMLPKVFFSAKSIKFYNPSEDILRIRNHSTHTKNGSPQKGYEKFEFNIEDCRKFIDFYKQSISKHPEWKDFGFRFSDTQRYNSIDEFYREVENQGYKLTFENISESYIDSVVNQGKLYLFQIYNKDFSAYSKGRPNLHTLYWKALFDERNLQDVVYKLNGEAELFYRKQSIPKKITHPAKEAIANKNKDNPKKESVFEYDLIKDKRFTEDKFFFHCPITINFKSSGANKFNDEINLLLKEKANDVHILSIARGERHLAYYTLVDGKGNIIKQDTFNIIGNDRMKTNYHDKLAAIEKDRDSARKDWKKINNIKEMKEGYLSQVVHEIAKLVIEYNAIVVFADLNFGFKRGRFKVEKQVYQKLEKMLIEKLNYLVFKDNEFDKTGGVLRAYQLTAPFETFKKMGKQTGIIYYVPAGFTSKICPVTGFVNQLYPKYESVSKSQEFFSKFDKICYNLDKGYFEFSFDYKNFGDKAAKGKWTIASFGSRLINFRNSDKNHNWDTREVYPTKELEKLLKDYSIEYGHGECIKAAICGESDKKFFAKLTSVLNTILQMRNSKTGTELDYLISPVADVNGNFFDSRQAPKNMPQDADANGAYHIGLKGLMLLGRIKNNQEGKKLNLVIKNEEYFEFVQNRNN

SEQ ID NO: 35 - protein, 1300 aa, Francisella novicida
MSIYQEFVNKYSLSKTLRFELIPQGKTLENIKARGLILDDEKRAKDYKKAKQIIDKYHQFFIEEILSSVCISEDLLQNYSDVYFKLKKSDDDNLQKDFKSAKDTIKKQISEYIKDSEKFKNLFNQNLIDAKKGQESDLILWLKQSKDNGIELFKANSDITDIDEALEIIKSFKGWTTYFKGFHENRKNVYSSNDIPTSIIYRIVDDNLPKFLENKAKYESLKDKAPEAINYEQIKKDLAEELTFDIDYKTSEVNQRVFSLDEVFEIANFNNYLNQSGITKFNTIIGGKFVNGENTKRKGINEYINLYSQQINDKTLKKYKMSVLFKQILSDTESKSFVIDKLEDDSDVVTTMQSFYEQIAAFKTVEEKSIKETLSLLFDDLKAQKLDLSKIYFKNDKSLTDLSQQVFDDYSVIGTAVLEYITQQIAPKNLDNPSKKEQELIAKKTEKAKYLSLETIKLALEEFNKHRDIDKQCRFEEILANFAAIPMIFDEIAQNKDNLAQISIKYQNQGKKDLLQASAEDDVKAIKDLLDQTNNLLHKLKIFHISQSEDKANILDKDEHFYLVFEECYFELANIVPLYNKIRNYITQKPYSDEKFKLNFENSTLANGWDKNKEPDNTAILFIKDDKYYLGVMNKKNNKIFDDKAIKENKGEGYKKIVYKLLPGANKMLPKVFFSAKSIKFYNPSEDILRIRNHSTHTKNGSPQKGYEKFEFNIEDCRKFIDFYKQSISKHPEWKDFGFRFSDTQRYNSIDEFYREVENQGYKLTFENISESYIDSVVNQGKLYLFQIYNKDFSAYSKGRPNLHTLYWKALFDERNLQDVVYKLNGEAELFYRKQSIPKKITHPAKEAIANKNKDNPKKESVFEYDLIKDKRFTEDKFFFHCPITINFKSSGANKFNDEINLLLKEKANDVHILSIARGERHLAYYTLVDGKGNIIKQDTFNIIGNDRMKTNYHDKLAAIEKDRDSARKDWKKINNIKEMKEGYLSQVVHEIAKLVIEYNAIVVFEDLNFGFKRGRFKVEKQVYQKLEKMLIEKLNYLVFKDNEFDKTGGVLRAYQLTAPFETFKKMGKQTGIIYYVPAGFTSKICPVTGFVNQLYPKYESVSKSQEFFSKFDKICYNLDKGYFEFSFDYKNFGDKAAKGKWTIASFGSRLINFRNSDKNHNWDTREVYPTKELEKLLKDYSIEYGHGECIKAAICGESDKKFFAKLTSVLNTILQMRNSKTGTELDYLISPVADVNGNFFDSRQAPKNMPQDAAANGAYHIGLKGLMLLGRIKNNQEGKKLNLVIKNEEYFEFVQNRNN

SEQ ID NO: 36 - protein, 1300 aa, Francisella novicida
MSIYQEFVNKYSLSKTLRFELIPQGKTLENIKARGLILDDEKRAKDYKKAKQIIDKYHQFFIEEILSSVCISEDLLQNYSDVYFKLKKSDDDNLQKDFKSAKDTIKKQISEYIKDSEKFKNLFNQNLIDAKKGQESDLILWLKQSKDNGIELFKANSDITDIDEALEIIKSFKGWTTYFKGFHENRKNVYSSNDIPTSIIYRIVDDNLPKFLENKAKYESLKDKAPEAINYEQIKKDLAEELTFDIDYKTSEVNQRVFSLDEVFEIANFNNYLNQSGITKFNTIIGGKFVNGENTKRKGINEYINLYSQQINDKTLKKYKMSVLFKQILSDTESKSFVIDKLEDDSDVVTTMQSFYEQIAAFKTVEEKSIKETLSLLFDDLKAQKLDLSKIYFKNDKSLTDLSQQVFDDYSVIGTAVLEYITQQIAPKNLDNPSKKEQELIAKKTEKAKYLSLETIKLALEEFNKHRDIDKQCRFEEILANFAAIPMIFDEIAQNKDNLAQISIKYQNQGKKDLLQASAEDDVKAIKDLLDQTNNLLHKLKIFHISQSEDKANILDKDEHFYLVFEECYFELANIVPLYNKIRNYITQKPYSDEKFKLNFENSTLANGWDKNKEPDNTAILFIKDDKYYLGVMNKKNNKIFDDKAIKENKGEGYKKIVYKLLPGANKMLPKVFFSAKSIKFYNPSEDILRIRNHSTHTKNGSPQKGYEKFEFNIEDCRKFIDFYKQSISKHPEWKDFGFRFSDTQRYNSIDEFYREVENQGYKLTFENISESYIDSVVNQGKLYLFQIYNKDFSAYSKGRPNLHTLYWKALFDERNLQDVVYKLNGEAELFYRKQSIPKKITHPAKEAIANKNKDNPKKESVFEYDLIKDKRFTEDKFFFHCPITINFKSSGANKFNDEINLLLKEKANDVHILSIDRGERHLAYYTLVDGKGNIIKQDTFNIIGNDRMKTNYHDKLAAIEKDRDSARKDWKKINNIKEMKEGYLSQVVHEIAKLVIEYNAIVVFADLNFGFKRGRFKVEKQVYQKLEKMLIEKLNYLVFKDNEFDKTGGVLRAYQLTAPFETFKKMGKQTGIIYYVPAGFTSKICPVTGFVNQLYPKYESVSKSQEFFSKFDKICYNLDKGYFEFSFDYKNFGDKAAKGKWTIASFGSRLINFRNSDKNHNWDTREVYPTKELEKLLKDYSIEYGHGECIKAAICGESDKKFFAKLTSVLNTILQMRNSKTGTELDYLISPVADVNGNFFDSRQAPKNMPQDAAANGAYHIGLKGLMLLGRIKNNQEGKKLNLVIKNEEYFEFVQNRNN

SEQ ID NO: 37 - protein, 1300 aa, Francisella novicida
MSIYQEFVNKYSLSKTLRFELIPQGKTLENIKARGLILDDEKRAKDYKKAKQIIDKYHQFFIEEILSSVCISEDLLQNYSDVYFKLKKSDDDNLQKDFKSAKDTIKKQISEYIKDSEKFKNLFNQNLIDAKKGQESDLILWLKQSKDNGIELFKANSDITDIDEALEIIKSFKGWTTYFKGFHENRKNVYSSNDIPTSIIYRIVDDNLPKFLENKAKYESLKDKAPEAINYEQIKKDLAEELTFDIDYKTSEVNQRVFSLDEVFEIANFNNYLNQSGITKFNTIIGGKFVNGENTKRKGINEYINLYSQQINDKTLKKYKMSVLFKQILSDTESKSFVIDKLEDDSDVVTTMQSFYEQIAAFKTVEEKSIKETLSLLFDDLKAQKLDLSKIYFKNDKSLTDLSQQVFDDYSVIGTAVLEYITQQIAPKNLDNPSKKEQELIAKKTEKAKYLSLETIKLALEEFNKHRDIDKQCRFEEILANFAAIPMIFDEIAQNKDNLAQISIKYQNQGKKDLLQASAEDDVKAIKDLLDQTNNLLHKLKIFHISQSEDKANILDKDEHFYLVFEECYFELANIVPLYNKIRNYITQKPYSDEKFKLNFENSTLANGWDKNKEPDNTAILFIKDDKYYLGVMNKKNNKIFDDKAIKENKGEGYKKIVYKLLPGANKMLPKVFFSAKSIKFYNPSEDILRIRNHSTHTKNGSPQKGYEKFEFNIEDCRKFIDFYKQSISKHPEWKDFGFRFSDTQRYNSIDEFYREVENQGYKLTFENISESYIDSVVNQGKLYLFQIYNKDFSAYSKGRPNLHTLYWKALFDERNLQDVVYKLNGEAELFYRKQSIPKKITHPAKEAIANKNKDNPKKESVFEYDLIKDKRFTEDKFFFHCPITINFKSSGANKFNDEINLLLKEKANDVHILSIARGERHLAYYTLVDGKGNIIKQDTFNIIGNDRMKTNYHDKLAAIEKDRDSARKDWKKINNIKEMKEGYLSQVVHEIAKLVIEYNAIVVFADLNFGFKRGRFKVEKQVYQKLEKMLIEKLNYLVFKDNEFDKTGGVLRAYQLTAPFETFKKMGKQTGIIYYVPAGFTSKICPVTGFVNQLYPKYESVSKSQEFFSKFDKICYNLDKGYFEFSFDYKNFGDKAAKGKWTIASFGSRLINFRNSDKNHNWDTREVYPTKELEKLLKDYSIEYGHGECIKAAICGESDKKFFAKLTSVLNTILQMRNSKTGTELDYLISPVADVNGNFFDSRQAPKNMPQDAAANGAYHIGLKGLMLLGRIKNNQEGKKLNLVIKNEEYFEFVQNRNN

SEQ ID NO: 38 - protein, 887 aa, Natronobacterium gregoryi
MTVIDLDSTTTADELTSGHTYDISVTLTGVYDNTDEQHPRMSLAFEQDNGERRYITLWKNTTPKDVFTYDYATGSTYIFTNIDYEVKDGYENLTATYQTTVENATAQEVGTTDEDETFAGGEPLDHHLDDALNETPDDAETESDSGHVMTSFASRDQLPEWTLHTYTLTATDGAKTDTEYARRTLAYTVRQELYTDHDAAPVATDGLMLLTPEPLGETPLDLDCGVRVEADETRTLDYTTAKDRLLARELVEEGLKRSLWDDYLVRGIDEVLSKEPVLTCDEFDLHERYDLSVEVGHSGRAYLHINFRHRFVPKLTLADIDDDNIYPGLRVKTTYRPRRGHIVWGLRDECATDSLNTLGNQSVVAYHRNNQTPINTDLLDAIEAADRRVVETRRQGHGDDAVSFPQELLAVEPNTHQIKQFASDGFHQQARSKTRLSASRCSEKAQAFAERLDPVRLNGSTVEFSSEFFTGNNEQQLRLLYENGESVLTFRDGARGAHPDETFSKGIVNPPESFEVAVVLPEQQADTCKAQWDTMADLLNQAGAPPTRSETVQYDAFSSPESISLNVAGAIDPSEVDAAFVVLPPDQEGFADLASPTETYDELKKALANMGIYSQMAYFDRFRDAKIFYTRNVALGLLAAAGGVAFTTEHAMPGDADMFIGIDVSRSYPEDGASGQINIAATATAVYKDGTILGHSSTRPQLGEKLQSTDVRDIMKNAILGYQQVTGESPTHIVIHRDGFMNEDLDPATEFLNEQGVEYDIVEIRKQPQTRLLAVSDVQYDTPVKSIAAINQNEPRATVATFGAPEYLATRDGGGLPRPIQIERVAGETDIETLTRQVYLLSQSHIQVHNSTARLPITTAYADQASTHATKGYLVQTGAFESNVGFL

SEQ ID NO: 39 - protein, 1129 aa, Alicyclobacillus acidoterrestris
MAVKSIKVKLRLDDMPEIRAGLWKLHKEVNAGVRYYTEWLSLLRQENLYRRSPNGDGEQECDKTAEECKAELLERLRARQVENGHRGPAGSDDELLQLARQLYELLVPQAIGAKGDAQQIARKFLSPLADKDAVGGLGIAKAGNKPRWVRMREAGEPGWEEEKEKAETRKSADRTADVLRALADFGLKPLMRVYTDSEMSSVEWKPLRKGQAVRTWDRDMFQQAIERMMSWESWNQRVGQEYAKLVEQKNRFEQKNFVGQEHLVHLVNQLQQDMKEASPGLESKEQTAHYVTGRALRGSDKVFEKWGKLAPDAPFDLYDAEIKNVQRRNTRRFGSHDLFAKLAEPEYQALWREDASFLTRYAVYNSILRKLNHAKMFATFTLPDATAHPIWTRFDKLGGNLHQYTFLFNEFGERRHAIRFHKLLKVENGVAREVDDVTVPISMSEQLDNLLPRDPNEPIALYFRDYGAEQHFTGEFGGAKIQCRRDQLAHMHRRRGARDVYLNVSVRVQSQSEARGERRPPYAAVFRLVGDNHRAFVHFDKLSDYLAEHPDDGKLGSEGLLSGLRVMSVDLGLRTSASISVFRVARKDELKPNSKGRVPFFFPIKGNDNLVAVHERSQLLKLPGETESKDLRAIREERQRTLRQLRTQLAYLRLLVRCGSEDVGRRERSWAKLIEQPVDAANHMTPDWREAFENELQKLKSLHGICSDKEWMDAVYESVRRVWRHMGKQVRDWRKDVRSGERPKIRGYAKDVVGGNSIEQIEYLERQYKFLKSWSFFGKVSGQVIRAEKGSRFAITLREHIDHAKEDRLKKLADRIIMEALGYVYALDERGKGKWVAKYPPCQLILLEELSEYQFNNDRPPSENNQLMQWSHRGVFQELINQAQVHDLLVGTMYAAFSSRFDARTGAPGIRCRRVPARCTQEHNPEPFPWWLNKFVVEHTLDACPLRADDLIPTGEGEIFVSPFSAEEGDFHQIHADLNAAQNLQQRLWSDFDISQIRLRCDWGEVDGELVLIPRLTGKRTADSYSNKVFYTNTGVTYYERERGKKRRKVFAQEKLSEEEAELLVEADEAREKSVVLMRDPSGIINRGNWTRQKEFWSMVNQRIEGYLVKQIRSRVPLQDSACENTGDI

SEQ ID NO: 40 - protein, 1389 aa, Leptotrichia shahii
MGNLFGHKRWYEVRDKKDFKIKRKVKVKRNYDGNKYILNINENNNKEKIDNNKFIRKYINYKKNDNILKEFTRKFHAGNILFKLKGKEGIIRIENNDDFLETEEVVLYIEAYGKSEKLKALGITKKKIIDEAIRQGITKDDKKIEIKRQENEEEIEIDIRDEYTNKTLNDCSIILRIIENDELETKKSIYEIFKNINMSLYKIIEKIIENETEKVFENRYYEEHLREKLLKDDKIDVILTNFMEIREKIKSNLEILGFVKFYLNVGGDKKKSKNKKMLVEKILNINVDLTVEDIADFVIKELEFWNITKRIEKVKKVNNEFLEKRRNRTYIKSYVLLDKHEKFKIERENKKDKIVKFFVENIKNNSIKEKIEKILAEFKIDELIKKLEKELKKGNCDTEIFGIFKKHYKVNFDSKKFSKKSDEEKELYKIIYRYLKGRIEKILVNEQKVRLKKMEKIEIEKILNESILSEKILKRVKQYTLEHIMYLGKLRHNDIDMTTVNTDDFSRLHAKEELDLELITFFASTNMELNKIFSRENINNDENIDFFGGDREKNYVLDKKILNSKIKIIRDLDFIDNKNNITNNFIRKFTKIGTNERNRILHAISKERDLQGTQDDYNKVINIIQNLKISDEEVSKALNLDVVFKDKKNIITKINDIKISEENNNDIKYLPSFSKVLPEILNLYRNNPKNEPFDTIETEKIVLNALIYVNKELYKKLILEDDLEENESKNIFLQELKKTLGNIDEIDENIIENYYKNAQISASKGNNKAIKKYQKKVIECYIGYLRKNYEELFDFSDFKMNIQEIKKQIKDINDNKTYERITVKTSDKTIVINDDFEYIISIFALLNSNAVINKIRNRFFATSVWLNTSEYQNIIDILDEIMQLNTLRNECITENWNLNLEEFIQKMKEIEKDFDDFKIQTKKEIFNNYYEDIKNNILTEFKDDINGCDVLEKKLEKIVIFDDETKFEIDKKSNILQDEQRKLSNINKKDLKKKVDQYIKDKDQEIKSKILCRIIFNSDFLKKYKKEIDNLIEDMESENENKFQEIYYPKERKNELYIYKKNLFLNIGNPNFDKIYGLISNDIKMADAKFLFNIDGKNIRKNKISEIDAILKNLNDKLNGYSKEYKEKYIKKLKENDDFFAKNIQNKNYKSFEKDYNRVSEYKKIRDLVEFNYLNKIESYLIDINWKLAIQMARFERDMHYIVNGLRELGIIKLSGYNTGISRAYPKRNGSDGFYTTTAYYKFFDEESYKKFEKICYGFGIDLSENSEINKPENESIRNYISHFYIVRNPFADYSIAEQIDRVSNLLSYSTRYNNSTYASVFEVFKKDVNLDYDELKKKFKLIGNNDILERLMKPKKVSVLELESYNSDYIKNLIIELLTKIENTNDTL

SEQ ID NO: 41 - protein, 7 aa, Artificial Sequence
  Synthetic
PKKKRKV

SEQ ID NO: 42 - protein, 30 aa, Artificial Sequence
  Synthetic
MDSLLMNRRKFLYQFKNVRWAKGRRETYLC

SEQ ID NO: 43 - protein, 18 aa, Artificial Sequence
  Synthetic
KRTADGSEFESPKKKRKV

SEQ ID NO: 44 - protein, 19 aa, Artificial Sequence
  Synthetic
KRGINDRNFWRGENGRKTR

SEQ ID NO: 45 - protein, 17 aa, Artificial Sequence
  Synthetic
KKTGGPIYRRVDGKWRR

SEQ ID NO: 46 - protein, 17 aa, Artificial Sequence
  Synthetic
RRELILYDKEEIRRIWR

SEQ ID NO: 47 - protein, 8 aa, Artificial Sequence
  Synthetic
AVSRKRKA

SEQ ID NO: 48 - protein, 313 aa, Artificial Sequence
  Synthetic
MIGQKTLYSFFSPSPARKRHAPSPEPAVQGTGVAGVPEESGDAAAIPAKKAPAGQEEPGTPPSSPLSAEQLDRIQRNKAAALLRLAARNVPVGFGESWKKHLSGEFGKPYFIKLMGFVAEERKHYTVYPPPHQVFTWTQMCDIKDVKVVILGQDPYHGPNQAHGLCFSVQRPVPPPPSLENIYKELSTDIEDFVHPGHGDLSGWAKQGVLLLNAVLTVRAHQANSHKERGWEQFTDAVVSWLNQNSNGLVFLLWGSYAQKKGSAIDRKRHHVLQTAHPSPLSVYRGFFGCRHFSKTNELLQKSGKKPIDWKEL

SEQ ID NO: 49 - protein, 209 aa, Artificial Sequence
  Synthetic
MAGAQDFVPHTADLAELAAAAGECRGCGLYRDATQAVFGAGGRSARIMMIGEQPGDKEDLAGLPFVGPAGRLLDRALEAADIDRDALYVTNAVKHFKFTRAAGGKRRIHKTPSRTEVVACRPWLIAEMTSVEPDVVVLLGATAAKALLGNDFRVTQHRGEVLHVDDVPGDPALVATVHPSSLLRGPKEERESAFAGLVDDLRVAADVRP

SEQ ID NO: 50 - protein, 209 aa, Artificial Sequence
  Synthetic
MAGAQDFVPHTADLAELAAAAGECRGCGLYRDATQAVFGAGGRSARIMMIGEQPGDKEDLAGLPFVGPAGRLLDRALEAADIDRDALYVTNAVKHFKFTRAAGGKRSIHKTPSRTEVVACRPWLIAEMTSVEPDVVVLLGATAAKALLGNDFRVTQHRGEVLHVDDVPGDPALVATVHPSSLLRGPKEERESAFAGLVDDLRVAADVRP

SEQ ID NO: 51 - protein, 209 aa, Artificial Sequence
  Synthetic
MAGAQDFVPHTADLAELAAAAGECRGCGLYRDATQAVFGAGGRSARIMMIGEQPGDKEDLAGLPFVGPAGRLLDRALEAADIDRDALYVTNAVKHFKFTRAAGGKRRISKTPSRTEVVACRPWLIAEMTSVEPDVVVLLGATAAKALLGNDFRVTQHRGEVLHVDDVPGDPALVATVHPSSLLRGPKEERESAFAGLVDDLRVAADVRP

SEQ ID NO: 52 - protein, 211 aa, Artificial Sequence
  Synthetic
MTTLTRQDLNFGQVVADVLCEFLEVAVHLILYVREVYPVGIFQKRKKYNVPVQMSCHPELNQYIQDTLHCVKPLLEKNDVEKVVVVILDKEHRPVEKFVFEITQPPLLSISSDSLLSHVEQLLRAFILKISVCDAVLDHNPPGCTFTVLVHTREAATRNMEKIQVIKDFPWILADEQDVHMHDPRLIPLKTMTSDILKMQLYVEERAHKGS

SEQ ID NO: 53 - protein, 270 aa, Artificial Sequence
  Synthetic
MPQAFLLGSIHEPAGALMEPQPCPGSLAESFLEEELRLNAELSQLQFSEPVGIIYNPVEYAWEPHRNYVTRYCQGPKEVLFLGMNPGPFGMAQTGVPFGEVSMVRDWLGIVGPVLTPPQEHPKRPVLGLECPQSEVSGARFWGFFRNLCGQPEVFFHHCFVHNLCPLLFLAPSGRNLTPAELPAKQREQLLGICDAALCRQVQLLGVRLVVGVGRLAEQRARRALAGLMPEVQVEGLLHPSPRNPQANKGWEAVAKERLNELGLLPLLLK

SEQ ID NO: 54 - protein, 335 aa, Artificial Sequence
  Synthetic
MSKRKAPQETLNGGITDMLTELANFEKNVSQAIHKYNAYRKAASVIAKYPHKIKSGAEAKKLPGVGTKIAEKIDEFLATGKLRKLEKIRQDDTSSSINFLTRVSGIGPSAARKFVDEGIKTLEDLRKNEDKLNHHQRIGLKYFGDFEKRIPREEMLQMQDIVLNEVKKVDSEYIATVCGSFRRGAESSGDMDVLLTHPSFTSESTKQPKLLHQVVEQLQKVHFITDTLSKGETKFMGVCQLPSKNDEKEYPHRRIDIRLIPKDQYYCGVLYFTGSDIFNKNMRAHALEKGFTINEYTIRPLGVTGVAGEPLPVDSEKDIFDYIQWKYREPKDRSE

SEQ ID NO: 55 - protein, 575 aa, Artificial Sequence
  Synthetic
MDPRGILKAFPKRQKIHADASSKVLAKIPRREEGEEAEEWLSSLRAHVVRTGIGRARAELFEKQIVQHGGQLCPAQGPGVTHIVVDEGMDYERALRLLRLPQLPPGAQLVKSAWLSLCLQERRLVDVAGFSIFIPSRYLDHPQPSKAEQDASIPPGTHEALLQTALSPPPPPTRPVSPPQKAKEAPNTQAQPISDDEASDGEETQVSAADLEALISGHYPTSLEGDCEPSPAPAVLDKWVCAQPSSQKATNHNLHITEKLEVLAKAYSVQGDKWRALGYAKAINALKSFHKPVTSYQEACSIPGIGKRMAEKIIEILESGHLRKLDHISESVPVLELFSNIWGAGTKTAQMWYQQGFRSLEDIRSQASLTTQQAIGLKHYSDFLERMPREEATEIEQTVQKAAQAFNSGLLCVACGSYRRGKATCGDVDVLITHPDGRSHRGIFSRLLDSLRQEGFLTDDLVSQEENGQQQKYLGVCRLPGPGRRHRRLDIIVVPYSEFACALLYFTGSAHFNRSMRALAKTKGMSLSEHALSTAVVRNTHGCKVGPGRVLPTPTEKDVFRLLGLPYREPAERDW

SEQ ID NO: 56 - protein, 713 aa, Artificial Sequence
  Synthetic
MATGQDRVVALVDMDCFFVQVEQRQNPHLRNKPCAVVQYKSWKGGGIIAVSYEARAFGVTRSMWADDAKKLCPDLLLAQVRESRGKANLTKYREASVEVMEIMSRFAVIERASIDEAYVDLTSAVQERLQKLQGQPISADLLPSTYIEGLPQGPTTAEETVQKEGMRKQGLFQWLDSLQIDNLTSPDLQLTVGAVIVEEMRAAIERETGFQCSAGISHNKVLAKLACGLNKPNRQTLVSHGSVPQLFSQMPIRKIRSLGGKLGASVIEILGIEYMGELTQFTESQLQSHFGEKNGSWLYAMCRGIEHDPVKPRQLPKTIGCSKNFPGKTALATREQVQWWLLQLAQELEERLTKDRNDNDRVATQLVVSIRVQGDKRLSSLRRCCALTRYDAHKMSHDAFTVIKNCNTSGIQTEWSPPLTMLFLCATKFSASAPSSSTDITSFLSSDPSSLPKVPVTSSEAKTQGSGPAVTATKKATTSLESFFQKAAERQKVKEASLSSLTAPTQAPMSNSPSKPSLPFQTSQSTGTEPFFKQKSLLLKQKQLNNSSVSSPQQNPWSNCKALPNSLPTEYPGCVPVCEGVSKLEESSKATPAEMDLAHNSQSMHASSASKSVLEVTQKATPNPSLLAAEDQVPCEKCGSLVPVWDMPEHMDYHFALELQKSFLQPHSSNPQVVSAVSHQGKRNPKSPLACTNKRPRPEGMQTLESFFKPLTH

SEQ ID NO: 57 - protein, 494 aa, Artificial Sequence
  Synthetic
MLPKRRRARVGSPSGDAASSTPPSTRFPGVAIYLVEPRMGRSRRAFLTGLARSKGFRVLDACSSEATHVVMEETSAEEAVSWQERRMAAAPPGCTPPALLDISWLTESLGAGQPVPVECRHRLEVAGPRKGPLSPAWMPAYACQRPTPLTHHNTGLSEALEILAEAAGFEGSEGRLLTFCRAASVLKALPSPVTTLSQLQGLPHFGEHSSRVVQELLEHGVCEEVERVRRSERYQTMKLFTQIFGVGVKTADRWYREGLRTLDDLREQPQKLTQQQKAGLQHHQDLSTPVLRSDVDALQQVVEEAVGQALPGATVTLTGGFRRGKLQGHDVDFLITHPKEGQEAGLLPRVMCRLQDQGLILYHQHQHSCCESPTRLAQQSHMDAFERSFCIFRLPQPPGAAVGGSTRPCPSWKAVRVDLVVAPVSQFPFALLGWTGSKLFQRELRRFSRKEKGLWLNSHGLFDPEQKTFFQAASEEDIFRHLGLEYLPPEQRNA

SEQ ID NO: 58 - protein, 740 aa, Artificial Sequence
  Synthetic
MEKLGVEPEEEGGGDDDEEDAEAWAMELADVGAAASSQGVHDQVLPTPNASSRVIVHVDLDCFYAQVEMISNPELKDKPLGVQQKYLVVTCNYEARKLGVKKLMNVRDAKEKCPQLVLVNGEDLTRYREMSYKVTELLEEFSPVVERLGFDENFVDLTEMVEKRLQQLQSDELSAVTVSGHVYNNQSINLLDVLHIRLLVGSQIAAEMREAMYNQLGLTGCAGVASNKLLAKLVSGVFKPNQQTVLLPESCQHLIHSLNHIKEIPGIGYKTAKCLEALGINSVRDLQTFSPKILEKELGISVAQRIQKLSFGEDNSPVILSGPPQSFSEEDSFKKCSSEVEAKNKIEELLASLLNRVCQDGRKPHTVRLIIRRYSSEKHYGRESRQCPIPSHVIQKLGTGNYDVMTPMVDILMKLFRNMVNVKMPFHLTLLSVCFCNLKALNTAKKGLIDYYLMPSLSTTSRSGKHSFKMKDTHMEDFPKDKETNRDFLPSGRIESTRTRESPLDTTNFSKEKDINEFPLCSLPEGVDQEVFKQLPVDIQEEILSGKSREKFQGKGSVSCPLHASRGVLSFFSKKQMQDIPINPRDHLSSSKQVSSVSPCEPGTSGFNSSSSSYMSSQKDYSYYLDNRLKDERISQGPKEPQGFHFTNSNPAVSAFHSFPNLQSEQLFSRNHTTDSHKQTVATDSHEGLTENREPDSVDEKITFPSDIDPQVFYELPEAVQKELLAEWKRAGSDFHIGHK

SEQ ID NO: 59 - protein, 870 aa, Artificial Sequence
  Synthetic
MDSTKEKCDSYKDDLLLRMGLNDNKAGMEGLDKEKINKIIMEATKGSRFYGNELKKEKQVNQRIENMMQQKAQITSQQLRKAQLQVDRFAMELEQSRNLSNTIVHIDMDAFYAAVEMRDNPELKDKPIAVGSMSMLSTSNYHARRFGVRAAMPGFIAKRLCPQLIIVPPNFDKYRAVSKEVKEILADYDPNFMAMSLDEAYLNITKHLEERQNWPEDKRRYFIKMGSSVENDNPGKEVNKLSEHERSISPLLFEESPSDVQPPGDPFQVNFEEQNNPQILQNSVVFGTSAQEVVKEIRFRIEQKTTLTASAGIAPNTMLAKVCSDKNKPNGQYQILPNRQAVMDFIKDLPIRKVSGIGKVTEKMLKALGIITCTELYQQRALLSLLFSETSWHYFLHISLGLGSTHLTRDGERKSMSVERTFSEINKAEEQYSLCQELCSELAQDLQKERLKGRTVTIKLKNVNFEVKTRASTVSSVVSTAEEIFAIAKELLKTEIDADFPHPLRLRLMGVRISSFPNEEDRKHQQRSIIGFLQAGNQALSATECTLEKTDKDKFVKPLEMSHKKSFFDKKRSERKWSHQDTFKCEAVNKQSFQTSQPFQVLKKKMNENLEISENSDDCQILTCPVCFRAQGCISLEALNKHVDECLDGPSISENFKMFSCSHVSATKVNKKENVPASSLCEKQDYEAHPKIKEISSVDCIALVDTIDNSSKAESIDALSNKHSKEECSSLPSKSFNIEHCHQNSSSTVSLENEDVGSFRQEYRQPYLCEVKTGQALVCPVCNVEQKTSDLTLFNVHVDVCLNKSFIQELRKDKFNPVNQPKESSRSTGSSSGVQKAVTRTKRPGLMTKYSTSKKIKPNNPKHTLDIFFK

SEQ ID NO: 60 - protein, 1468 aa, Artificial Sequence
  Synthetic
MAPVHGDDCEIGASALSDSGSFVSSRARREKKSKKGRQEALERLKKAKAGEKYKYEVEDFTGVYEEVDEEQYSKLVQARQDDDWIVDDDGIGYVEDGREIFDDDLEDDALDADEKGKDGKARNKDKRNVKKLAVTKPNNIKSMFIACAGKKTADKAVDLSKDGLLGDILQDLNTETPQITPPPVMILKKKRSIGASPNPFSVHTATAVPSGKIASPVSRKEPPLTPVPLKRAEFAGDDVQVESTEEEQESGAMEFEDGDFDEPMEVEEVDLEPMAAKAWDKESEPAEEVKQEADSGKGTVSYLGSFLPDVSCWDIDQEGDSSFSVQEVQVDSSHLPLVKGADEEQVFHFYWLDAYEDQYNQPGVVFLFGKVWIESAETHVSCCVMVKNIERTLYFLPREMKIDLNTGKETGTPISMKDVYEEFDEKIATKYKIMKFKSKPVEKNYAFEIPDVPEKSEYLEVKYSAEMPQLPQDLKGETFSHVFGTNTSSLELFLMNRKIKGPCWLEVKSPQLLNQPVSWCKVEAMALKPDLVNVIKDVSPPPLVVMAFSMKTMQNAKNHQNEIIAMAALVHHSFALDKAAPKPPFQSHFCVVSKPKDCIFPYAFKEVIEKKNVKVEVAATERTLLGFFLAKVHKIDPDIIVGHNIYGFELEVLLQRINVCKAPHWSKIGRLKRSNMPKLGGRSGFGERNATCGRMICDVEISAKELIRCKSYHLSELVQQILKTERVVIPMENIQNMYSESSQLLYLLEHTWKDAKFILQIMCELNVLPLALQITNIAGNIMSRTLMGGRSERNEFLLLHAFYENNYIVPDKQIFRKPQQKLGDEDEEIDGDTNKYKKGRKKAAYAGGLVLDPKVGFYDKFILLLDFNSLYPSIIQEFNICFTTVQRVASEAQKVTEDGEQEQIPELPDPSLEMGILPREIRKLVERRKQVKQLMKQQDLNPDLILQYDIRQKALKLTANSMYGCLGFSYSRFYAKPLAALVTYKGREILMHTKEMVQKMNLEVIYGDTDSIMINTNSTNLEEVFKLGNKVKSEVNKLYKLLEIDIDGVFKSLLLLKKKKYAALVVEPTSDGNYVTKQELKGLDIVRRDWCDLAKDTGNFVIGQILSDQSRDTIVENIQKRLIEIGENVLNGSVPVSQFEINKALTKDPQDYPDKKSLPHVHVALWINSQGGRKVKAGDTVSYVICQDGSNLTASQRAYAPEQLQKQDNLTIDTQYYLAQQIHPVVARICEPIDGIDAVLIATWLGLDPTQFRVHHYHKDEENDALLGGPAQLTDEEKYRDCERFKCPCPTCGTENIYDNVFDGSGTDMEPSLYRCSNIDCKASPLTFTVQLSNKLIMDIRRFIKKYYDGWLICEEPTCRNRTRHLPLQFSRTGPLCPACMKATLQPEYSDKSLYTQLCFYRYIFDAECALEKLTTDHEKDKLKKQFFTPKVLQDYRKLKNTAEQFLSRSGYSEVNLSKLFAGCAVKS

SEQ ID NO: 61 - protein, 1107 aa, Artificial Sequence [sequence omitted]

SEQ ID NO: 62 - protein, 1239 aa, Artificial Sequence
  Synthetic
MSRLLWRKVAGATVGPGPVPAPGRWVSSSVPASDPSDGQRRRQQQQQQQQQQQQQPQQPQVLSSEGGQLRHNPLDIQMLSRGLHEQIFGQGGEMPGEAAVRRSVEHLQKHGLWGQPAVPLPDVELRLPPLYGDNLDQHFRLLAQKQSLPYLEAANLLLQAQLPPKPPAWAWAEGWTRYGPEGEAVPVAIPEERALVFDVEVCLAEGTCPTLAVAISPSAWYSWCSQRLVEERYSWTSQLSPADLIPLEVPTGASSPTQRDWQEQLVVGHNVSFDRAHIREQYLIQGSRMRFLDTMSMHMAISGLSSFQRSLWIAAKQGKHKVQPPTKQGQKSQRKARRGPAISSWDWLDISSVNSLAEVHRLYVGGPPLEKEPRELFVKGTMKDIRENFQDLMQYCAQDVWATHEVFQQQLPLFLERCPHPVTLAGMLEMGVSYLPVNQNWERYLAEAQGTYEELQREMKKSLMDLANDACQLLSGERYKEDPWLWDLEWDLQEFKQKKAKKVKKEPATASKLPIEGAGAPGDPMDQEDLGPCSEEEEFQQDVMARACLQKLKGTTELLPKRPQHLPGHPGWYRKLCPRLDDPAWTPGPSLLSLQMRVTPKLMALTWDGFPLHYSERHGWGYLVPGRRDNLAKLPTGTTLESAGVVCPYRAIESLYRKHCLEQGKQQLMPQEAGLAEEFLLTDNSAIWQTVEELDYLEVEAEAKMENLRAAVPGQPLALTARGGPKDTQPSYHHGNGPYNDVDIPGCWFFKLPHKDGNSCNVGSPFAKDFLPKMEDGTLQAGPGGASGPRALEINKMISFWRNAHKRISSQMVVWLPRSALPRAVIRHPDYDEEGLYGAILPQVVTAGTITRRAVEPTWLTASNARPDRVGSELKAMVQAPPGYTLVGADVDSQELWIAAVLGDAHFAGMHGCTAFGWMTLQGRKSRGTDLHSKTATTVGISREHAKIFNYGRIYGAGQPFAERLLMQFNHRLTQQEAAEKAQQMYAATKGLRWYRLSDEGEWLVRELNLPVDRTEGGWISLQDLRKVQRETARKSQWKKWEVVAERAWKGGTESEMFNKLESIATSDIPRTPVLGCCISRALEPSAVQEEFMTSRVNWVVQSSAVDYLHLMLVAMKWLFEEFAIDGRFCISIHDEVRYLVREEDRYRAALALQITNLLTRCMFAYKLGLNDLPQSVAFFSAVDIDRCLRKEVTMDCKTPSNPTGMERRYGIPQGEALDIYQIIELTKGSLEKRSQPGP

SEQ ID NO: 63 - protein, 900 aa, Artificial Sequence
  Synthetic
MENYEALVGFDLCNTPLSSVAQKIMSAMHSGDLVDSKTWGKSTETMEVINKSSVKYSVQLEDRKTQSPEKKDLKSLRSQTSRGSAKLSPQSFSVRLTDQLSADQKQKSISSLTLSSCLIPQYNQEASVLQKKGHKRKHFLMENINNENKGSINLKRKHITYNNLSEKTSKQMALEEDTDDAEGYLNSGNSGALKKHFCDIRHLDDWAKSQLIEMLKQAAALVITVMYTDGSTQLGADQTPVSSVRGIVVLVKRQAEGGHGCPDAPACGPVLEGFVSDDPCIYIQIEHSAIWDQEQEAHQQFARNVLFQTMKCKCPVICFNAKDFVRIVLQFFGNDGSWKHVADFIGLDPRIAAWLIDPSDATPSFEDLVEKYCEKSITVKVNSTYGNSSRNIVNQNVRENLKTLYRLTMDLCSKLKDYGLWQLFRTLELPLIPILAVMESHAIQVNKEEMEKTSALLGARLKELEQEAHFVAGERFLITSNNQLREILFGKLKLHLLSQRNSLPRTGLQKYPSTSEAVLNALRDLHPLPKIILEYRQVHKIKSTFVDGLLACMKKGSISSTWNQTGTVTGRLSAKHPNIQGISKHPIQITTPKNFKGKEDKILTISPRAMFVSSKGHTFLAADFSQIELRILTHLSGDPELLKLFQESERDDVFSTLTSQWKDVPVEQVTHADREQTKKVVYAVVYGAGKERLAACLGVPIQEAAQFLESFLQKYKKIKDFARAAIAQCHQTGCVVSIMGRRRPLPRIHAHDQQLRAQAERQAVNFVVQGSAADLCKLAMIHVFTAVAASHTLTARLVAQIHDELLFEVEDPQIPECAALVRRTMESLEQVQALELQLQVPLKVSLSAGRSWGHLVPLQEAWGPPPGPCRTESPSNSLAAPGSPASTQPPPLHFSPSFCL

SEQ ID NO: 64 - protein, 1251 aa, Artificial Sequence
  Synthetic
MRRGGWRKRAENDGWETWGGYMAAKVQKLEEQFRSDAAMQKDGTSSTIFSGVAIYVNGYTDPSAEELRKLMMLHGGQYHVYYSRSKTTHIIATNLPNAKIKELKGEKVIRPEWIVESIKAGRLLSYIPYQLYTKQSSVQKGLSFNPVCRPEDPLPGPSNIAKQLNNRVNHIVKKIETENEVKVNGMNSWNEEDENNDFSFVDLEQTSPGRKQNGIPHPRGSTAIFNGHTPSSNGALKTQDCLVPMVNSVASRLSPAFSQEEDKAEKSSTDFRDCTLQQLQQSTRNTDALRNPHRTNSFSLSPLHSNTKINGAHHSTVQGPSSTKSTSSVSTFSKAAPSVPSKPSDCNFISNFYSHSRLHHISMWKCELTEFVNTLQRQSNGIFPGREKLKKMKTGRSALVVTDTGDMSVLNSPRHQSCIMHVDMDCFFVSVGIRNRPDLKGKPVAVTSNRGTGRAPLRPGANPQLEWQYYQNKILKGKAADIPDSSLWENPDSAQANGIDSVLSRAEIASCSYEARQLGIKNGMFFGHAKQLCPNLQAVPYDFHAYKEVAQTLYETLASYTHNIEAVSCDEALVDITEILAETKLTPDEFANAVRMEIKDQTKCAASVGIGSNILLARMATRKAKPDGQYHLKPEEVDDFIRGQLVTNLPGVGHSMESKLASLGIKTCGDLQYMTMAKLQKEFGPKTGQMLYRFCRGLDDRPVRTEKERKSVSAEINYGIRFTQPKEAEAFLLSLSEEIQRRLEATGMKGKRLTLKIMVRKPGAPVETAKFGGHGICDNIARTVTLDQATDNAKIIGKAMLNMFHTMKLNISDMRGVGIHVNQLVPTNLNPSTCPSRPSVQSSHFPSGSYSVRDVFQVQKAKKSTEEEHKEVFRAAVDLEISSASRTCTFLPPFPAHLPTSPDTNKAESSGKWNGLHTPVSVQSRLNLSIEVPSPSQLDQSVLEALPPDLREQVEQVCAVQQAESHGDKKKEPVNGCNTGILPQPVGTVLLQIPEPQESNSDAGINLIALPAFSQVDPEVFAALPAELQRELKAAYDQRQRQGENSTHQQSASASVPKNPLLHLKAAVKEKKRNKKKKTIGSPKRIQSPLNNKLLNSPAKTLPGACGSPQKLIDGFLKHEGPPAEKPLEELSASTSGVPGLSSLQSDPAGCVRPPAPNLAGAVEFNDVKTLLREWITTISDPMEEDILQVVKYCTDLIEEKDLEKLDLVIKYMKRLMQQSVESVWNMAFDFILDNVQVVLQQTYGSTLKVT

SEQ ID NO: 65 - protein, 313 aa, Artificial Sequence
  Synthetic
MIGQKTLYSFFSPSPARKRHAPSPEPAVQGTGVAGVPEESGDAAAIPAKKAPAGQEEPGTPPSSPLSAEQLDRIQRNKAAALLRLAARNVPVGFGESWKKHLSGEFGKPYFIKLMGFVAEERKHYTVYPPPHQVFTWTQMCDIKDVKVVILGQDPAHGPNQAHGLCFSVQRPVPPPPSLENIYKELSTDIEDFVHPGHGDLSGWAKQGVLLLNAVLTVRAHQANSHKERGWEQFTDAVVSWLNQNSNGLVFLLWGSYAQKKGSAIDRKRHHVLQTAHPSPLSVYRGFFGCRHFSKTNELLQKSGKKPIDWKEL

SEQ ID NO: 66 - protein, 313 aa, Artificial Sequence
  Synthetic
MIGQKTLYSFFSPSPARKRHAPSPEPAVQGTGVAGVPEESGDAAAIPAKKAPAGQEEPGTPPSSPLSAEQLDRIQRNKAAALLRLAARNVPVGFGESWKKHLSGEFGKPYFIKLMGFVAEERKHYTVYPPPHQVFTWTQMCDIKDVKVVILGQDPYHGPNQAHGLCFSVQRPVPPPPSLENIYKELSTDIEDFVHPGHGDLSGWAKQGVLLLDAVLTVRAHQANSHKERGWEQFTDAVVSWLNQNSNGLVFLLWGSYAQKKGSAIDRKRHHVLQTAHPSPLSVYRGFFGCRHFSKTNELLQKSGKKPIDWKEL

SEQ ID NO: 67 - protein, 198 aa, Artificial Sequence [sequence omitted]

SEQ ID NO: 68 - protein, 198 aa, Artificial Sequence
  Synthetic
MDSLLMKQKKFLYHFKNVRWAKGRHETYLCYVVKRRDSATSCSLDFGHLRNKSGCHVELLFLRYISDWDLDPGRCYRVTWFTSWSPCYDCARHVAEFLRWNPNLSLRIFTARLYFCEDRKAEPEGLRRLHRAGVQIGIMTFKDYFYCWNTFVENRERTFKAWEGLHENSVRLTRQLRRILLPLYEVDDLRDAFRMLGF

SEQ ID NO: 69 - protein, 198 aa, Artificial Sequence
  Synthetic
MDSLLMKQRKFLYHFKNVRWAKGRHETYLCYVVKRRDSATSFSLDFGHLRNKSGCHVELLFLRYISDWDLDPGRCYRVTWFTSWSPCYDCARHVADFLRGYPNLSLRIFAARLYFCEDRKAEPEGLRRLHRAGVQIAIMTFKDYFYCWNTFVENREKTFKAWEGLHENSVRLSRQLRRILLPLYEVDDLRDAFRTLGL

SEQ ID NO: 70 - protein, 199 aa, Artificial Sequence
  Synthetic
MDSLLKKQRQFLYQFKNVRWAKGRHETYLCYVVKRRDSPTSFSLDFGHLRNKAGCHVELLFLRYISDWDLDPGRCYRVTWFTSWSPCYDCARHVADFLRGYPNLSLRIFTARLYFCDKERKAEPEGLRRLHRAGVQIAIMTFKDYFYCWNTFVENHERTFKAWEGLHENSVRLSRQLRRILLPLYEVDDLRDAFRTLGL

SEQ ID NO: 71 - protein, 239 aa, Artificial Sequence
  Synthetic
MAVGSKPKAALVGPHWERERIWCFLCSTGLGTQQTGQTSRWLRPAATQDPVSPPRSLLMKQRKFLYHFKNVRWAKGRHETYLCYVVKRRDSATSFSLDFGYLRNKSGCHVELLFLRYISDWDLDPGRCYRVTWFTSWSPCYDCARHVADFLRGNPNLSLRIFTARLTGWGALPAGLMSPARPSDYFYCWNTFVENHERTFKAWEGLHENSVRLSRRLRRILLPLYEVDDLRDAFRTLGL

SEQ ID NO: 72 - protein, 429 aa, Artificial Sequence
  Synthetic
MGPFCLGCSHRKCYSPIRNLISQETFKFHFKNLGYAKGRKDTFLCYEVTRKDCDSPVSLHHGVFKNKDNIHAEICFLYWFHDKVLKVLSPREEFKITWYMSWSPCFECAEQIVRFLATHHNLSLDIFSSRLYNVQDPETQQNLCRLVQEGAQVAAMDLYEFKKCWKKFVDNGGRRFRPWKRLLTNFRYQDSKLQEILRPCYIPVPSSSSSTLSNICLTKGLPETRFCVEGRRMDPLSEEEFYSQFYNQRVKHLCYYHRMKPYLCYQLEQFNGQAPLKGCLLSEKGKQHAEILFLDKIRSMELSQVTITCYLTWSPCPNCAWQLAAFKRDRPDLILHIYTSRLYFHWKRPFQKGLCSLWQSGILVDVMDLPQFTDCWTNFVNPKRPFWPWKGLEIISRRTQRRLRRIKESWGLQDLVNDFGNLQLGPPMS

SEQ ID NO: 73 - protein, 429 aa, Artificial Sequence
  Synthetic
MGPFCLGCSHRKCYSPIRNLISQETFKFHFKNLRYAIDRKDTFLCYEVTRKDCDSPVSLHHGVFKNKDNIHAEICFLYWFHDKVLKVLSPREEFKITWYMSWSPCFECAEQVLRFLATHHNLSLDIFSSRLYNIRDPENQQNLCRLVQEGAQVAAMDLYEFKKCWKKFVDNGGRRFRPWKKLLTNFRYQDSKLQEILRPCYIPVPSSSSSTLSNICLTKGLPETRFCVERRRVHLLSEEEFYSQFYNQRVKHLCYYHGVKPYLCYQLEQFNGQAPLKGCLLSEKGKQHAEILFLDKIRSMELSQVIITCYLTWSPCPNCAWQLAAFKRDRPDLILHIYTSRLYFHWKRPFQKGLCSLWQSGILVDVMDLPQFTDCWTNFVNPKRPFWPWKGLEIISRRTQRRLHRIKESWGLQDLVNDFGNLQLGPPMS

SEQ ID NO: 74 - protein, 370 aa, Artificial Sequence
  Synthetic
MVEPMDPRTFVSNFNNRPILSGLNTVWLCCEVKTKDPSGPPLDAKIFQGKVYSKAKYHPEMRFLRWFHKWRQLHHDQEYKVTWYVSWSPCTRCANSVATFLAKDPKVTLTIFVARLYYFWKPDYQQALRILCQKRGGPHATMKIMNYNEFQDCWNKFVDGRGKPFKPRNNLPKHYTLLQATLGELLRHLMDPGTFTSNFNNKPWVSGQHETYLCYKVERLHNDTWVPLNQHRGFLRNQAPNIHGFPKGRHAELCFLDLIPFWKLDGQQYRVTCFTSWSPCFSCAQEMAKFISNNEHVSLCIFAARIYDDQGRYQEGLRALHRDGAKIAMMNYSEFEYCWDTFVDRQGRPFQPWDGLDEHSQALSGRLRAI

SEQ ID NO: 75 - protein, 384 aa, Artificial Sequence
  Synthetic
MKPHFRNPVERMYQDTFSDNFYNRPILSHRNTVWLCYEVKTKGPSRPPLDAKIFRGQVYSKLKYHPEMRFFHWFSKWRKLHRDQEYEVTWYISWSPCTKCTRDVATFLAEDPKVTLTIFVARLYYFWDPDYQEALRSLCQKRDGPRATMKIMNYDEFQHCWSKFVYSQRELFEPWNNLPKYYILLHIMLGEILRHSMDPPTFTSNFNNELWVRGRHETYLCYEVERLHNDTWVLLNQRRGFLCNQAPHKHGFLEGRHAELCFLDVIPFWKLDLHQDYRVTCFTSWSPCFSCAQEMAKFISNNKHVSLCIFAARIYDDQGRCQEGLRTLAKAGAKISIMTYSEFKHCWDTFVDHQGCPFQPWDGLEEHSQALSGRLRAILQNQGN

SEQ ID NO: 76 - protein, 377 aa, Artificial Sequence
  Synthetic
MNPQIRNMVEQMEPDIFVYYFNNRPILSGRNTVWLCYEVKTKDPSGPPLDANIFQGKLYPEAKDHPEMKFLHWFRKWRQLHRDQEYEVTWYVSWSPCTRCANSVATFLAEDPKVTLTIFVARLYYFWKPDYQQALRILCQERGGPHATMKIMNYNEFQHCWNEFVDGQGKPFKPRKNLPKHYTLLHATLGELLRHVMDPGTFTSNFNNKPWVSGQRETYLCYKVERSHNDTWVLLNQHRGFLRNQAPDRHGFPKGRHAELCFLDLIPFWKLDDQQYRVTCFTSWSPCFSCAQKMAKFISNNKHVSLCIFAARIYDDQGRCQEGLRTLHRDGAKIAVMNYSEFEYCWDTFVDRQGRPFQPWDGLDEHSQALSGRLRAI

SEQ ID NO: 77 - protein, 384 aa, Artificial Sequence
  Synthetic
MKPHFRNTVERMYRDTFSYNFYNRPILSRRNTVWLCYEVKTKGPSRPPLDAKIFRGQVYSELKYHPEMRFFHWFSKWRKLHRDQEYEVTWYISWSPCTKCTRDMATFLAEDPKVTLTIFVARLYYFWDPDYQEALRSLCQKRDGPRATMKIMNYDEFQHCWSKFVYSQRELFEPWNNLPKYYILLHIMLGEILRHSMDPPTFTFNFNNEPWVRGRHETYLCYEVERMHNDTWVLLNQRRGFLCNQAPHKHGFLEGRHAELCFLDVIPFWKLDLDQDYRVTCFTSWSPCFSCAQEMAKFISKNKHVSLCIFTARIYDDQGRCQEGLRTLAEAGAKISIMTYSEFKHCWDTFVDHQGCPFQPWDGLDEHSQDLSGRLRAILQNQEN

SEQ ID NO: 78 - protein, 373 aa, Artificial Sequence
  Synthetic
MKPHFRNTVERMYRDTFSYNFYNRPILSRRNTVWLCYEVKTKGPSRPRLDAKIFRGQVYSQPEHHAEMCFLSWFCGNQLPAYKCFQITWFVSWTPCPDCVAKLAEFLAEHPNVTLTISAARLYYYWERDYRRALCRLSQAGARVKIMDDEEFAYCWENFVYSEGQPFMPWYKFDDNYAFLHRTLKEILRNPMEAMYPHIFYFHFKNLRKAYGRNESWLCFTMEVVKHHSPVSWKRGVFRNQVDPETHCHAERCFLSWFCDDILSPNTNYEVTWYTSWSPCPECAGEVAEFLARHSNVNLTIFTARLYYFWDTDYQEGLRSLSQEGASVEIMGYKDFKYCWENFVYNDDEPFKPWKGLKYNFLFLDSKLQEILE

SEQ ID NO: 79 - protein, 382 aa, Artificial Sequence
  Synthetic
MNPQIRNPMERMYRDTFYDNFENEPILYGRSYTWLCYEVKIKRGRSNLLWDTGVFRGQVYFKPQYHAEMCFLSWFCGNQLPAYKCFQITWFVSWTPCPDCVAKLAEFLSEHPNVTLTISAARLYYYWERDYRRALCRLSQAGARVTIMDYEEFAYCWENFVYNEGQQFMPWYKFDENYAFLHRTLKEILRYLMDPDTFTFNFNNDPLVLRRRQTYLCYEVERLDNGTWVLMDQHMGFLCNEAKNLLCGFYGRHAELRFLDLVPSLQLDPAQIYRVTWFISWSPCFSWGCAGEVRAFLQENTHVRLRIFAARIYDYDPLYKEALQMLRDAGAQVSIMTYDEFEYCWDTFVYRQGCPFQPWDGLEEHSQALSGRLRAILQNQGN

SEQ ID NO: 80 - protein, 396 aa, Artificial Sequence
  Synthetic
MQPQGLGPNAGMGPVCLGCSHRRPYSPIRNPLKKLYQQTFYFHFKNVRYAWGRKNNFLCYEVNGMDCALPVPLRQGVFRKQGHIHAELCFIYWFHDKVLRVLSPMEEFKVTWYMSWSPCSKCAEQVARFLAAHRNLSLAIFSSRLYYYLRNPNYQQKLCRLIQEGVHVAAMDLPEFKKCWNKFVDNDGQPFRPWMRLRINFSFYDCKLQEIFSRMNLLREDVFYLQFNNSHRVKPVQNRYYRRKSYLCYQLERANGQEPLKGYLLYKKGEQHVEILFLEKMRSMELSQVRITCYLTWSPCPNCARQLAAFKKDHPDLILRIYTSRLYFYWRKKFQKGLCTLWRSGIHVDVMDLPQFADCWTNFVNPQRPFRPWNELEKNSWRIQRRLRRIKESWGL

SEQ ID NO: 81 - protein, 227 aa, Artificial Sequence
  Synthetic
DGWEVAFRSGTVLKAGVLGVSMTEGWAGSGHPGQGACVWTPGTRNTMNLLREVLFKQQFGNQPRVPAPYYRRKTYLCYQLKQRNDLTLDRGCFRNKKQRHAEIRFIDKINSLDLNPSQSYKIICYITWSPCPNCANELVNFITRNNHLKLEIFASRLYFHWIKSFKMGLQDLQNAGISVAVMTHTEFEDCWEQFVDNQSRPFQPWDKLEQYSASIRRRLQRILTAPI

SEQ ID NO: 82 - protein, 490 aa, Artificial Sequence
  Synthetic
MNPQIRNPMEWMYQRTFYYNFENEPILYGRSYTWLCYEVKIRRGHSNLLWDTGVFRGQMYSQPEHHAEMCFLSWFCGNQLSAYKCFQITWFVSWTPCPDCVAKLAKFLAEHPNVTLTISAARLYYYWERDYRRALCRLSQAGARVKIMDDEEFAYCWENFVYNEGQPFMPWYKFDDNYAFLHRTLKEIIRHLMDPDTFTFNFNNDPLVLRRHQTYLCYEVERLDNGTWVLMDQHMGFLCNEAKNLLCGFYGRHAELRFLDLVPSLQLDPAQIYRVTWFISWSPCFSWGCAGQVRAFLQENTHVRLRIFAARIYDYDPLYKEALQMLRDAGAQVSIMTYDEFEYCWDTFVYRQGCPFQPWDGLEEHSQALSGRLRAILQVRASSLCMVPHRPPPPPQSPGPCLPLCSEPPLGSLLPTGRPAPSLPFLLTASFSFPPPASLPPLPSLSLSPGHLPVPSFHSLTSCSIQPPCSSRIRETEGWASVSKEGRDLG

SEQ ID NO: 83 - protein, 190 aa, Artificial Sequence
  Synthetic
MNPQIRNPMKAMYPGTFYFQFKNLWEANDRNETWLCFTVEGIKRRSVVSWKTGVFRNQVDSETHCHAERCFLSWFCDDILSPNTKYQVTWYTSWSPCPDCAGEVAEFLARHSNVNLTIFTARLYYFQYPCYQEGLRSLSQEGVAVEIMDYEDFKYCWENFVYNDNEPFKPWKGLKTNFRLLKRRLRESLQ

SEQ ID NO: 84 - protein, 190 aa, Artificial Sequence
  Synthetic
MNPQIRNPMKAMYPGTFYFQFKNLWEANDRNETWLCFTVEGIKRRSVVSWKTGVFRNQVDSETHCHAERCFLSWFCDDILSPNTNYQVTWYTSWSPCPECAGEVAEFLARHSNVNLTIFTARLYYFQDTDYQEGLRSLSQEGVAVKIMDYKDFKYCWENFVYNDDEPFKPWKGLKYNFRFLKRRLQEILE

SEQ ID NO: 85 - protein, 199 aa, Artificial Sequence
  Synthetic
MEASPASGPRHLMDPHIFTSNFNNGIGRHKTYLCYEVERLDNGTSVKMDQHRGFLHNQAKNLLCGFYGRHAELRFLDLVPSLQLDPAQIYRVTWFISWSPCFSWGCAGEVRAFLQENTHVRLRIFAARIYDYDPLYKEALQMLRDAGAQVSIMTYDEFKHCWDTFVDHQGCPFQPWDGLDEHSQALSGRLRAILQNQGN

SEQ ID NO: 86 - protein, 202 aa, Artificial Sequence
  Synthetic
MDGSPASRPRHLMDPNTFTFNFNNDLSVRGRHQTYLCYEVERLDNGTWVPMDERRGFLCNKAKNVPCGDYGCHVELRFLCEVPSWQLDPAQTYRVTWFISWSPCFRRGCAGQVRVFLQENKHVRLRIFAARIYDYDPLYQEALRTLRDAGAQVSIMTYEEFKHCWDTFVDRQGRPFQPWDGLDEHSQALSGRLRAILQNQGN

SEQ ID NO: 87 - protein, 185 aa, Artificial Sequence
  Synthetic
MDEYTFTENFNNQGWPSKTYLCYEMERLDGDATIPLDEYKGFVRNKGLDQPEKPCHAELYFLGKIHSWNLDRNQHYRLTCFISWSPCYDCAQKLTTFLKENHHISLHILASRIYTHNRFGCHQSGLCELQAAGARITIMTFEDFKHCWETFVDHKGKPFQPWEGLNVKSQALCTELQAILKTQQN

SEQ ID NO: 88 - protein, 200 aa, Artificial Sequence
  Synthetic
MALLTAETFRLQFNNKRRLRRPYYPRKALLCYQLTPQNGSTPTRGYFENKKKCHAEICFINEIKSMGLDETQCYQVTCYLTWSPCSSCAWELVDFIKAHDHLNLGIFASRLYYHWCKPQQKGLRLLCGSQVPVEVMGFPKFADCWENFVDHEKPLSFNPYKMLEELDKNSRAIKRRLERIKIPGVRAQGRYMDILCDAEV

SEQ ID NO: 89 - protein, 210 aa, Artificial Sequence
  Synthetic
MALLTAKTFSLQFNNKRRVNKPYYPRKALLCYQLTPQNGSTPTRGHLKNKKKDHAEIRFINKIKSMGLDETQCYQVTCYLTWSPCPSCAGELVDFIKAHRHLNLRIFASRLYYHWRPNYQEGLLLLCGSQVPVEVMGLPEFTDCWENFVDHKEPPSFNPSEKLEELDKNSQAIKRRLERIKSRSVDVLENGLRSLQLGPVTPSSSIRNSR

SEQ ID NO: 90 - protein, 386 aa, Artificial Sequence
  Synthetic
MNPQIRNPMERMYRDTFYDNFENEPILYGRSYTWLCYEVKIKRGRSNLLWDTGVFRGPVLPKRQSNHRQEVYFRFENHAEMCFLSWFCGNRLPANRRFQITWFVSWNPCLPCVVKVTKFLAEHPNVTLTISAARLYYYRDRDWRWVLLRLHKAGARVKIMDYEDFAYCWENFVCNEGQPFMPWYKFDDNYASLHRTLKEILRNPMEAMYPHIFYFHFKNLLKACGRNESWLCFTMEVTKHHSAVFRKRGVFRNQVDPETHCHAERCFLSWFCDDILSPNTNYEVTWYTSWSPCPECAGEVAEFLARHSNVNLTIFTARLCYFWDTDYQEGLCSLSQEGASVKIMGYKDFVSCWKNFVYSDDEPFKPWKGLQTNFRLLKRRLREILQ

SEQ ID NO: 91 - protein, 236 aa, Artificial Sequence
  Synthetic
MTSEKGPSTGDPTLRRRIEPWEFDVFYDPRELRKEACLLYEIKWGMSRKIWRSSGKNTTNHVEVNFIKKFTSERDFHPSMSCSITWFLSWSPCWECSQAIREFLSRHPGVTLVIYVARLFWHMDQQNRQGLRDLVNSGVTIQIMRASEYYHCWRNFVNYPPGDEAHWPQYPPLWMMLYALELHCIILSLPPCLKISRRWQNHLTFFRLHLQNCHYQTIPPHILLATGLIHPSVAWR

SEQ ID NO: 92 - protein, 229 aa, Artificial Sequence
  Synthetic
MSSETGPVAVDPTLRRRIEPHEFEVFFDPRELRKETCLLYEINWGGRHSVWRHTSQNTSNHVEVNFLEKFTTERYFRPNTRCSITWFLSWSPCGECSRAITEFLSRHPYVTLFIYIARLYHHTDQRNRQGLRDLISSGVTIQIMTEQEYCYCWRNFVNYPPSNEAYWPRYPHLWVKLYVLELYCIILGLPPCLKILRRKQPQLTFFTITLQTCHYQRIPPHLLWATGLK

SEQ ID NO: 93 - protein, 229 aa, Artificial Sequence [sequence omitted]

SEQ ID NO: 94 - protein, 224 aa, Artificial Sequence
  Synthetic
MAQKEEAAVATEAASQNGEDLENLDDPEKLKELIELPPFEIVTGERLPANFFKFQFRNVEYSSGRNKTFLCYVVEAQGKGGQVQASRGYLEDEHAAAHAEEAFFNTILPAFDPALRYNVTWYVSSSPCAACADRIIKTLSKTKNLRLLILVGRLFMWEEPEIQAALKKLKEAGCKLRIMKPQDFEYVWQNFVEQEEGESKAFQPWEDIQENFLYYEEKLADILK

SEQ ID NO: 95 - protein, 224 aa, Artificial Sequence
  Synthetic
MAQKEEAAEAAAPASQNGDDLENLEDPEKLKELIDLPPFEIVTGVRLPVNFFKFQFRNVEYSSGRNKTFLCYVVEVQSKGGQAQATQGYLEDEHAGAHAEEAFFNTILPAFDPALKYNVTWYVSSSPCAACADRILKTLSKTKNLRLLILVSRLFMWEEPEVQAALKKLKEAGCKLRIMKPQDFEYIWQNFVEQEEGESKAFEPWEDIQENFLYYEEKLADILK

SEQ ID NO: 96 - protein, 224 aa, Artificial Sequence
  Synthetic
MAQKEEAAEAAAPASQNGDDLENLEDPEKLKELIDLPPFEIVTGVRLPVNFFKFQFRNVEYSSGRNKTFLCYVVEAQSKGGQVQATQGYLEDEHAGAHAEEAFFNTILPAFDPALKYNVTWYVSSSPCAACADRILKTLSKTKNLRLLILVSRLFMWEEPEVQAALKKLKEAGCKLRIMKPQDFEYLWQNFVEQEEGESKAFEPWEDIQENFLYYEEKLADILK

SEQ ID NO: 97 - protein, 224 aa, Artificial Sequence
  Synthetic
MAQKEEAAAAAEPASQNGEEVENLEDPEKLKELIELPPFEIVTGERLPAHYFKFQFRNVEYSSGRNKTFLCYVVEAQSKGGQVQASRGYLEDEHATNHAEEAFFNSIMPTFDPALRYMVTWYVSSSPCAACADRIVKTLNKTKNLRLLILVGRLFMWEEPEIQAALRKLKEAGCRLRIMKPQDFEYIWQNFVEQEEGESKAFEPWEDIQENFLYYEEKLADILK

SEQ ID NO: 98 - protein, 208 aa, Artificial Sequence
  Synthetic
MTDAEYVRIHEKLDIYTFKKQFFNNKKSVSHRCYVLFELKRRGERRACFWGYAVNKPQSGTERGIHAEIFSIRKVEEYLRDNPGQFTINWYSSWSPCADCAEKILEWYNQELRGNGHTLKIWACKLYYEKNARNQIGLWNLRDNGVGLNVMVSEHYQCCRKIFIQSSHNQLNENRWLEKTLKRAEKRRSELSIMIQVKILHTTKSPAV

SEQ ID NO: 99 - protein, 384 aa, Artificial Sequence
  Synthetic
MKPHFRNTVERMYRDTFSYNFYNRPILSRRNTVWLCYEVKTKGPSRPPLDAKIFRGQVYSELKYHPEMRFFHWFSKWRKLHRDQEYEVTWYISWSPCTKCTRDMATFLAEDPKVTLTIFVARLYYFWDPDYQEALRSLCQKRDGPRATMKIMNYDEFQHCWSKFVYSQRELFEPWNNLPKYYILLHIMLGEILRHSMDPPTFTFNFNNEPWVRGRHETYLCYEVERMHNDTWVLLNQRRGFLCNQAPHKHGFLEGRHAELCFLDVIPFWKLDLDQDYRVTCFTSWSPCFSCAQEMAKFISKNKHVSLCIFTARIYRRQGRCQEGLRTLAEAGAKISIMTYSEFKHCWDTFVDHQGCPFQPWDGLDEHSQDLSGRLRAILQNQEN

SEQ ID NO: 100 - protein, 184 aa, Artificial Sequence
  Synthetic
MDPPTFTFNFNNEPWVRGRHETYLCYEVERMHNDTWVLLNQRRGFLCNQAPHKHGFLEGRHAELCFLDVIPFWKLDLDQDYRVTCFTSWSPCFSCAQEMAKFISKNKHVSLCIFTARIYDDQGRCQEGLRTLAEAGAKISIMTYSEFKHCWDTFVDHQGCPFQPWDGLDEHSQDLSGRLRAILQ

SEQ ID NO: 101 - protein, 184 aa, Artificial Sequence
  Synthetic
MDPPTFTFNFNNEPWVRGRHETYLCYEVERMHNDTWVLLNQRRGFLCNQAPHKHGFLEGRHAELCFLDVIPFWKLDLDQDYRVTCFTSWSPCFSCAQEMAKFISKNKHVSLCIFTARIYRRQGRCQEGLRTLAEAGAKISIMTYSEFKHCWDTFVDHQGCPFQPWDGLDEHSQDLSGRLRAILQ

SEQ ID NO: 102 - protein, 16 aa, Artificial Sequence
  Synthetic
SGSETPGTSESATPES

SEQ ID NO: 103 - protein, 4 aa, Artificial Sequence
  Synthetic
  REPEAT (1)..(4): May be repeated between 1 and 30 times
SGGS

SEQ ID NO: 104 - protein, 4 aa, Artificial Sequence
  Synthetic
  Repeat (1)..(4): May be repeated between 1 and 30 times
GGGS

SEQ ID NO: 105 - protein, 5 aa, Artificial Sequence
  Synthetic
  REPEAT (1)..(5): May be repeated between 1 and 30 times
GGGGS

SEQ ID NO: 106 - protein, 5 aa, Artificial Sequence
  Synthetic
  REPEAT (1)..(5): May be repeated between 1 and 30 times
EAAAK

SEQ ID NO: 107 - protein, 24 aa, Artificial Sequence
  Synthetic
SGGSSGSETPGTSESATPESSGGS

SEQ ID NO: 108 - protein, 32 aa, Artificial Sequence
  Synthetic
SGGSSGGSSGSETPGTSESATPESSGGSSGGS

SEQ ID NO: 109 - protein, 104 aa, Artificial Sequence
  Synthetic
GGSGGSPGSPAGSPTSTEEGTSESATPESGPGTSTEPSEGSAPGSPAGSPTSTEEGTSTEPSEGSAPGTSTEPSEGSAPGTSESATPESGPGSEPATSGGSGGS

SEQ ID NO: 110 - DNA, 20 bp, Artificial Sequence
  Synthetic
gaacacaaagcatagactgc

SEQ ID NO: 111 - DNA, 20 bp, Artificial Sequence
  Synthetic
cttgtgtttcgtatctgacg

SEQ ID NO: 112 - DNA, 20 bp, Artificial Sequence
  Synthetic
gtcatcttagtcattacctg

SEQ ID NO: 113 - DNA, 20 bp, Artificial Sequence
  Synthetic
cagtagaatcagtaatggac

SEQ ID NO: 114 - DNA, 20 bp, Artificial Sequence
  Synthetic
ggaatcccttctgcagcacc

SEQ ID NO: 115 - protein, 1710 aa, Artificial Sequence
  Synthetic
MSSETGPVAVDPTLRRRIEPHEFEVFFDPRELRKETCLLYEINWGGRHSIWRHTSQNTNKHVEVNFIEKFTTERYFCPNTRCSITWFLSWSPCGECSRAITEFLSRYPHVTLFIYIARLYHHADPRNRQGLRDLISSGVTIQIMTEQESGYCWRNFVNYSPSNEAHWPRYPHLWVRLYVLELYCIILGLPPCLNILRRKQPQLTFFTIALQSCHYQRLPPHILWATGLKSGSETPGTSESATPESDKKYSIGLAIGTNSVGWAVITDEYKVPSKKFKVLGNTDRHSIKKNLIGALLFDSGETAEATRLKRTARRRYTRRKNRICYLQEIFSNEMAKVDDSFFHRLEESFLVEEDKKHERHPIFGNIVDEVAYHEKYPTIYHLRKKLVDSTDKADLRLIYLALAHMIKFRGHFLIEGDLNPDNSDVDKLFIQLVQTYNQLFEENPINASGVDAKAILSARLSKSRRLENLIAQLPGEKKNGLFGNLIALSLGLTPNFKSNFDLAEDAKLQLSKDTYDDDLDNLLAQIGDQYADLFLAAKNLSDAILLSDILRVNTEITKAPLSASMIKRYDEHHQDLTLLKALVRQQLPEKYKEIFFDQSKNGYAGYIDGGASQEEFYKFIKPILEKMDGTEELLVKLNREDLLRKQRTFDNGSIPHQIHLGELHAILRRQEDFYPFLKDNREKIEKILTFRIPYYVGPLARGNSRFAWMTRKSEETITPWNFEEVVDKGASAQSFIERMTNFDKNLPNEKVLPKHSLLYEYFTVYNELTKVKYVTEGMRKPAFLSGEQKKAIVDLLFKTNRKVTVKQLKEDYFKKIECFDSVEISGVEDRFNASLGTYHDLLKIIKDKDFLDNEENEDILEDIVLTLTLFEDREMIEERLKTYAHLFDDKVMKQLKRRRYTGWGRLSRKLINGIRDKQSGKTILDFLKSDGFANRNFMQLIHDDSLTFKEDIQKAQVSGQGDSLHEHIANLAGSPAIKKGILQTVKVVDELVKVMGRHKPENIVIEMARENQTTQKGQKNSRERMKRIEEGIKELGSQILKEHPVENTQLQNEKLYLYYLQNGRDMYVDQELDINRLSDYDVDHIVPQSFLKDDSIDNKVLTRSDKNRGKSDNVPSEEVVKKMKNYWRQLLNAKLITQRKFDNLTKAERGGLSELDKAGFIKRQLVETRQITKHVAQILDSRMNTKYDENDKLIREVKVITLKSKLVSDFRKDFQFYKVREINNYHHAHDAYLNAVVGTALIKKYPKLESEFVYGDYKVYDVRKMIAKSEQEIGKATAKYFFYSNIMNFFKTEITLANGEIRKRPLIETNGETGEIVWDKGRDFATVRKVLSMPQVNIVKKTEVQTGGFSKESILPKRNSDKLIARKKDWDPKKYGGFDSPTVAYSVLVVAKVEKGKSKKLKSVKELLGITIMERSSFEKNPIDFLEAKGYKEVKKDLIIKLPKYSLFELENGRKRMLASAGELQKGNELALPSKYVNFLYLASHYEKLKGSPEDNEQKQLFVEQHKHYLDEIIEQISEFSKRVILADANLDKVLSAYNKHRDKPIREQAENIIHLFTLTNLGAPAAFKYFDTTIDRKRYTSTKEVLDATLIHQSITGLYETRIDLSQLGGDSGGSTNLSDIIEKETGKQLVIQESILMLPEEVEEVIGNKPESDILVHTAYDESTDENVMLLTSDAPEYKPWALVIQDSNGENKIKMLSGGSPKKKRKV

SEQ ID NO: 116 - protein, 1612 aa, Artificial Sequence
  Synthetic
MSSETGPVAVDPTLRRRIEPHEFEVFFDPRELRKETCLLYEINWGGRHSIWRHTSQNTNKHVEVNFIEKFTTERYFCPNTRCSITWFLSWSPCGECSRAITEFLSRYPHVTLFIYIARLYHHADPRNRQGLRDLISSGVTIQIMTEQESGYCWRNFVNYSPSNEAHWPRYPHLWVRLYVLELYCIILGLPPCLNILRRKQPQLTFFTIALQSCHYQRLPPHILWATGLKSGSETPGTSESATPESDKKYSIGLAIGTNSVGWAVITDEYKVPSKKFKVLGNTDRHSIKKNLIGALLFDSGETAEATRLKRTARRRYTRRKNRICYLQEIFSNEMAKVDDSFFHRLEESFLVEEDKKHERHPIFGNIVDEVAYHEKYPTIYHLRKKLVDSTDKADLRLIYLALAHMIKFRGHFLIEGDLNPDNSDVDKLFIQLVQTYNQLFEENPINASGVDAKAILSARLSKSRRLENLIAQLPGEKKNGLFGNLIALSLGLTPNFKSNFDLAEDAKLQLSKDTYDDDLDNLLAQIGDQYADLFLAAKNLSDAILLSDILRVNTEITKAPLSASMIKRYDEHHQDLTLLKALVRQQLPEKYKEIFFDQSKNGYAGYIDGGASQEEFYKFIKPILEKMDGTEELLVKLNREDLLRKQRTFDNGSIPHQIHLGELHAILRRQEDFYPFLKDNREKIEKILTFRIPYYVGPLARGNSRFAWMTRKSEETITPWNFEEVVDKGASAQSFIERMTNFDKNLPNEKVLPKHSLLYEYFTVYNELTKVKYVTEGMRKPAFLSGEQKKAIVDLLFKTNRKVTVKQLKEDYFKKIECFDSVEISGVEDRFNASLGTYHDLLKIIKDKDFLDNEENEDILEDIVLTLTLFEDREMIEERLKTYAHLFDDKVMKQLKRRRYTGWGRLSRKLINGIRDKQSGKTILDFLKSDGFANRNFMQLIHDDSLTFKEDIQKAQVSGQGDSLHEHIANLAGSPAIKKGILQTVKVVDELVKVMGRHKPENIVIEMARENQTTQKGQKNSRERMKRIEEGIKELGSQILKEHPVENTQLQNEKLYLYYLQNGRDMYVDQELDINRLSDYDVDHIVPQSFLKDDSIDNKVLTRSDKNRGKSDNVPSEEVVKKMKNYWRQLLNAKLITQRKFDNLTKAERGGLSELDKAGFIKRQLVETRQITKHVAQILDSRMNTKYDENDKLIREVKVITLKSKLVSDFRKDFQFYKVREINNYHHAHDAYLNAVVGTALIKKYPKLESEFVYGDYKVYDVRKMIAKSEQEIGKATAKYFFYSNIMNFFKTEITLANGEIRKRPLIETNGETGEIVWDKGRDFATVRKVLSMPQVNIVKKTEVQTGGFSKESILPKRNSDKLIARKKDWDPKKYGGFDSPTVAYSVLVVAKVEKGKSKKLKSVKELLGITIMERSSFEKNPIDFLEAKGYKEVKKDLIIKLPKYSLFELENGRKRMLASAGELQKGNELALPSKYVNFLYLASHYEKLKGSPEDNEQKQLFVEQHKHYLDEIIEQISEFSKRVILADANLDKVLSAYNKHRDKPIREQAENIIHLFTLTNLGAPAAFKYFDTTIDRKRYTSTKEVLDATLIHQSITGLYETRIDLSQLGGD

SEQ ID NO: 117 - protein, 1929 aa, Artificial Sequence
  Synthetic
MSSETGPVAVDPTLRRRIEPHEFEVFFDPRELRKETCLLYEINWGGRHSIWRHTSQNTNKHVEVNFIEKFTTERYFCPNTRCSITWFLSWSPCGECSRAITEFLSRYPHVTLFIYIARLYHHADPRNRQGLRDLISSGVTIQIMTEQESGYCWRNFVNYSPSNEAHWPRYPHLWVRLYVLELYCIILGLPPCLNILRRKQPQLTFFTIALQSCHYQRLPPHILWATGLKSGSETPGTSESATPESDKKYSIGLAIGTNSVGWAVITDEYKVPSKKFKVLGNTDRHSIKKNLIGALLFDSGETAEATRLKRTARRRYTRRKNRICYLQEIFSNEMAKVDDSFFHRLEESFLVEEDKKHERHPIFGNIVDEVAYHEKYPTIYHLRKKLVDSTDKADLRLIYLALAHMIKFRGHFLIEGDLNPDNSDVDKLFIQLVQTYNQLFEENPINASGVDAKAILSARLSKSRRLENLIAQLPGEKKNGLFGNLIALSLGLTPNFKSNFDLAEDAKLQLSKDTYDDDLDNLLAQIGDQYADLFLAAKNLSDAILLSDILRVNTEITKAPLSASMIKRYDEHHQDLTLLKALVRQQLPEKYKEIFFDQSKNGYAGYIDGGASQEEFYKFIKPILEKMDGTEELLVKLNREDLLRKQRTFDNGSIPHQIHLGELHAILRRQEDFYPFLKDNREKIEKILTFRIPYYVGPLARGNSRFAWMTRKSEETITPWNFEEVVDKGASAQSFIERMTNFDKNLPNEKVLPKHSLLYEYFTVYNELTKVKYVTEGMRKPAFLSGEQKKAIVDLLFKTNRKVTVKQLKEDYFKKIECFDSVEISGVEDRFNASLGTYHDLLKIIKDKDFLDNEENEDILEDIVLTLTLFEDREMIEERLKTYAHLFDDKVMKQLKRRRYTGWGRLSRKLINGIRDKQSGKTILDFLKSDGFANRNFMQLIHDDSLTFKEDIQKAQVSGQGDSLHEHIANLAGSPAIKKGILQTVKVVDELVKVMGRHKPENIVIEMARENQTTQKGQKNSRERMKRIEEGIKELGSQILKEHPVENTQLQNEKLYLYYLQNGRDMYVDQELDINRLSDYDVDHIVPQSFLKDDSIDNKVLTRSDKNRGKSDNVPSEEVVKKMKNYWRQLLNAKLITQRKFDNLTKAERGGLSELDKAGFIKRQLVETRQITKHVAQILDSRMNTKYDENDKLIREVKVITLKSKLVSDFRKDFQFYKVREINNYHHAHDAYLNAVVGTALIKKYPKLESEFVYGDYKVYDVRKMIAKSEQEIGKATAKYFFYSNIMNFFKTEITLANGEIRKRPLIETNGETGEIVWDKGRDFATVRKVLSMPQVNIVKKTEVQTGGFSKESILPKRNSDKLQNEKLYLYYLQNGRDMYVDQELDINRLSDYDVDHIVPQSFLKDDSIDNKVLTRSDKNRGKSDNVPSEEVVKKMKNYWRQLLNAKLITQRKFDNLTKAERGGLSELDKAGFIKRQLVETRQITKHVAQILDSRMNTKYDENDKLIREVKVITLKSKLVSDFRKDFQFYKVREINNYHHAHDAYLNAVVGTALIKKYPKLESEFVYGDYKVYDVRKMIAKSEQEIGKATAKYFFYSNIMNFFKTEITLANGEIRKRPLIETNGETGEIVWDKGRDFATVRKVLSMPQVNIVKKTEVQTGGFSKESILPKRNSDKLIARKKDWDPKKYGGFDSPTVAYSVLVVAKVEKGKSKKLKSVKELLGITIMERSSFEKNPIDFLEAKGYKEVKKDLIIKLPKYSLFELENGRKRMLASAGELQKGNELALPSKYVNFLYLASHYEKLKGSPEDNEQKQLFVEQHKHYLDEIIEQISEFSKRVILADANLDKVLSAYNKHRDKPIREQAENIIHLFTLTNLGAPAAFKYFDTTIDRKRYTSTKEVLDATLIHQSITGLYETRIDLSQLGGDSGGS

SEQ ID NO: 118 - protein, 1385 aa, Artificial Sequence
  Synthetic
SETPGTSESATPESDKKYSIGLAIGTNSVGWAVITDEYKVPSKKFKVLGNTDRHSIKKNLIGALLFDSGETAEATRLKRTARRRYTRRKNRICYLQEIFSNEMAKVDDSFFHRLEESFLVEEDKKHERHPIFGNIVDEVAYHEKYPTIYHLRKKLVDSTDKADLRLIYLALAHMIKFRGHFLIEGDLNPDNSDVDKLFIQLVQTYNQLFEENPINASGVDAKAILSARLSKSRRLENLIAQLPGEKKNGLFGNLIALSLGLTPNFKSNFDLAEDAKLQLSKDTYDDDLDNLLAQIGDQYADLFLAAKNLSDAILLSDILRVNTEITKAPLSASMIKRYDEHHQDLTLLKALVRQQLPEKYKEIFFDQSKNGYAGYIDGGASQEEFYKFIKPILEKMDGTEELLVKLNREDLLRKQRTFDNGSIPHQIHLGELHAILRRQEDFYPFLKDNREKIEKILTFRIPYYVGPLARGNSRFAWMTRKSEETITPWNFEEVVDKGASAQSFIERMTNFDKNLPNEKVLPKHSLLYEYFTVYNELTKVKYVTEGMRKPAFLSGEQKKAIVDLLFKTNRKVTVKQLKEDYFKKIECFDSVEISGVEDRFNASLGTYHDLLKIIKDKDFLDNEENEDILEDIVLTLTLFEDREMIEERLKTYAHLFDDKVMKQLKRRRYTGWGRLSRKLINGIRDKQSGKTILDFLKSDGFANRNFMQLIHDDSLTFKEDIQKAQVSGQGDSLHEHIANLAGSPAIKKGILQTVKVVDELVKVMGRHKPENIVIEMARENQTTQKGQKNSRERMKRIEEGIKELGSQILKEHPVENTQLQNEKLYLYYLQNGRDMYVDQELDINRLSDYDVDHIVPQSFLKDDSIDNKVLTRSDKNRGKSDNVPSEEVVKKMKNYWRQLLNAKLITQRKFDNLTKAERGGLSELDKAGFIKRQLVETRQITKHVAQILDSRMNTKYDENDKLIREVKVITLKSKLVSDFRKDFQFYKVREINNYHHAHDAYLNAVVGTALIKKYPKLESEFVYGDYKVYDVRKMIAKSEQEIGKATAKYFFYSNIMNFFKTEITLANGEIRKRPLIETNGETGEIVWDKGRDFATVRKVLSMPQVNIVKKTEVQTGGFSKESILPKRNSDKLIARKKDWDPKKYGGFDSPTVAYSVLVVAKVEKGKSKKLKSVKELLGITIMERSSFEKNPIDFLEAKGYKEVKKDLIIKLPKYSLFELENGRKRMLASAGELQKGNELALPSKYVNFLYLASHYEKLKGSPEDNEQKQLFVEQHKHYLDEIIEQISEFSKRVILADANLDKVLSAYNKHRDKPIREQAENIIHLFTLTNLGAPAAFKYFDTTIDRKRYTSTKEVLDATLIHQSITGLYETRIDLSQLGGDSGGS

SEQ ID NO: 119 - RNA, 81 nt, Artificial Sequence
  Synthetic
guuuuagagcuagaaauagcaaguuaaaauaaggcuaguccguuaucaacuugaaaaaguggcaccgagucggugcuuuuu

SEQ ID NO: 120 - protein, 10 aa, Artificial Sequence
  Synthetic
SGGSGGSGGS

SEQ ID NO: 121 - protein, 1 aa, Artificial Sequence
  Synthetic
  REPEAT (1)..(1): May be repeated between 1 and 30 times
G

SEQ ID NO: 122 - protein, 3 aa, Artificial Sequence
  Synthetic
  REPEAT (1)..(3): May be repeated between 1 and 30 times
GGS

SEQ ID NO: 123 - protein, 2 aa, Artificial Sequence
  Synthetic
  REPEAT (1)..(2): May be repeated between 1 and 30 times
XP

SEQ ID NO: 124 - DNA, 11 bp, Artificial Sequence
  Synthetic
aggcctttctg

SEQ ID NO: 125 - DNA, 11 bp, Artificial Sequence
  Synthetic
ctccactgcgg

SEQ ID NO: 126 - DNA, 11 bp, Artificial Sequence
  Synthetic
gaccagtcgga

SEQ ID NO: 127 - DNA, 11 bp, Artificial Sequence
  Synthetic
tcgactcttca

SEQ ID NO: 128 - DNA, 11 bp, Artificial Sequence
  Synthetic
atctctagact

SEQ ID NO: 129 - DNA, 11 bp, Artificial Sequence
  Synthetic
gactctcctca

SEQ ID NO: 130 - DNA, 11 bp, Artificial Sequence
  Synthetic
aggtctttcgg

SEQ ID NO: 131 - DNA, 11 bp, Artificial Sequence
  Synthetic
ttacacaaggg

SEQ ID NO: 132 - DNA, 11 bp, Artificial Sequence
  Synthetic
acacaccaagc

SEQ ID NO: 133 - DNA, 11 bp, Artificial Sequence
  Synthetic
atcactattgc

SEQ ID NO: 134 - DNA, 11 bp, Artificial Sequence
  Synthetic
ggccccctccg

SEQ ID NO: 135 - DNA, 33 bp, Artificial Sequence
  Synthetic
actttttgataggcagcctgcactggtggggtg

SEQ ID NO: 136 - DNA, 33 bp, Artificial Sequence
  Synthetic
actttgtgataggcagcctgcactggtggggtg

SEQ ID NO: 137 - DNA, 33 bp, Artificial Sequence
  Synthetic
actttctcataggcagcctgcactggtggggtg

SEQ ID NO: 138 - DNA, 33 bp, Artificial Sequence
  Synthetic
actttttgataggcagcttgcactggtggggtg

SEQ ID NO: 139 - DNA, 33 bp, Artificial Sequence
  Synthetic
actttctaataggcagcctgcactggtggggtg

SEQ ID NO: 140 - DNA, 33 bp, Artificial Sequence
  Synthetic
actttatgataggcagcctgcactggtggggtg

SEQ ID NO: 141 - DNA, 33 bp, Artificial Sequence
  Synthetic
actttctgataggcagcttgcactggtggggtg

SEQ ID NO: 142 - DNA, 33 bp, Artificial Sequence
  Synthetic
actttgtgataggcagcttgcactggtggggtg

SEQ ID NO: 143 - DNA, 33 bp, Artificial Sequence
  Synthetic
actttctgataggcagcatgcactggtggggtg

SEQ ID NO: 144 - DNA, 33 bp, Artificial Sequence; identical to SEQ ID NO: 141
  Synthetic

SEQ ID NO: 145 - DNA, 33 bp, Artificial Sequence
  Synthetic
actttctgataggcagcgtgcactggtggggtg

SEQ ID NO: 146 - DNA, 33 bp, Artificial Sequence
  Synthetic
actttctgataggcagtttgcactggtggggtg

SEQ ID NO: 147 - DNA, 33 bp, Artificial Sequence
  Synthetic
actttttgataggcagtttgcactggtggggtg

SEQ ID NO: 148 - DNA, 33 bp, Artificial Sequence
  Synthetic
actttatgataggcagcttgcactggtggggtg

SEQ ID NO: 149 - DNA, 33 bp, Artificial Sequence
  Synthetic
actttttgataggcagcgtgcactggtggggtg

SEQ ID NO: 150 - DNA, 33 bp, Artificial Sequence; identical to SEQ ID NO: 142
  Synthetic

SEQ ID NO: 151 - DNA, 33 bp, Artificial Sequence; identical to SEQ ID NO: 138
  Synthetic

SEQ ID NO: 152 - DNA, 33 bp, Artificial Sequence
  Synthetic
actttttgataggcagcatgcactggtggggtg

SEQ ID NO: 153 - DNA, 33 bp, Artificial Sequence
  Synthetic
actttgtgataggcagcgtgcactggtggggtg

SEQ ID NO: 154 - DNA, 33 bp, Artificial Sequence; identical to SEQ ID NO: 135
  Synthetic

SEQ ID NO: 155 - DNA, 33 bp, Artificial Sequence
  Synthetic
actttctcataggcagcttgcactggtggggtg

SEQ ID NO: 156 - DNA, 33 bp, Artificial Sequence
  Synthetic
actttctaataggcagcttgcactggtggggtg

SEQ ID NO: 157 - DNA, 33 bp, Artificial Sequence
  Synthetic
actttctcataggcagcgtgcactggtggggtg

SEQ ID NO: 158 - DNA, 33 bp, Artificial Sequence; identical to SEQ ID NO: 137
  Synthetic

SEQ ID NO: 159 - DNA, 33 bp, Artificial Sequence; identical to SEQ ID NO: 139
  Synthetic

SEQ ID NO: 160 - DNA, 33 bp, Artificial Sequence
  Synthetic
actttttcataggcagcctgcactggtggggtg

SEQ ID NO: 161 - protein, 9 aa, Artificial Sequence
  Synthetic
CCCNNGRRT

SEQ ID NO: 162 - DNA, 33 bp, Artificial Sequence
  Synthetic
actttctgataggcagcctgcactggtggggtg

SEQ ID NO: 163 - DNA, 33 bp, Artificial Sequence; identical to SEQ ID NO: 145
  Synthetic

SEQ ID NO: 164 - DNA, 33 bp, Artificial Sequence; identical to SEQ ID NO: 141
  Synthetic

SEQ ID NO: 165 - DNA, 33 bp, Artificial Sequence; identical to SEQ ID NO: 138
  Synthetic

SEQ ID NO: 166 - DNA, 33 bp, Artificial Sequence; identical to SEQ ID NO: 149
  Synthetic

SEQ ID NO: 167 - DNA, 33 bp, Artificial Sequence; identical to SEQ ID NO: 143
  Synthetic

SEQ ID NO: 168 - DNA, 33 bp, Artificial Sequence; identical to SEQ ID NO: 142
  Synthetic

SEQ ID NO: 169 - DNA, 33 bp, Artificial Sequence; identical to SEQ ID NO: 152
  Synthetic

SEQ ID NO: 170 - DNA, 33 bp, Artificial Sequence; identical to SEQ ID NO: 153
  Synthetic

SEQ ID NO: 171 - DNA, 33 bp, Artificial Sequence; identical to SEQ ID NO: 147
  Synthetic

SEQ ID NO: 172 - DNA, 33 bp, Artificial Sequence; identical to SEQ ID NO: 146
  Synthetic

SEQ ID NO: 173 - DNA, 33 bp, Artificial Sequence; identical to SEQ ID NO: 148
  Synthetic

SEQ ID NO: 174 - DNA, 23 bp, Artificial Sequence
  Synthetic
actttttgataggcagcctgcac

SEQ ID NO: 175 - DNA, 9 bp, Artificial Sequence
  Synthetic
actctccac

SEQ ID NO: 176 - DNA, 9 bp, Artificial Sequence
  Synthetic
tcactctag

SEQ ID NO: 177 - DNA, 9 bp, Artificial Sequence
  Synthetic
aactacacg

SEQ ID NO: 178 - DNA, 11 bp, Artificial Sequence
  Synthetic
tgccctaccca

SEQ ID NO: 179 - DNA, 11 bp, Artificial Sequence
  Synthetic
actccgggcga

SEQ ID NO: 180 - DNA, 11 bp, Artificial Sequence
  Synthetic
caacctctctc

SEQ ID NO: 181 - DNA, 11 bp, Artificial Sequence
  Synthetic
gtctctacagt

SEQ ID NO: 182 - DNA, 11 bp, Artificial Sequence
  Synthetic
cagtctccaac

SEQ ID NO: 183 - DNA, 11 bp, Artificial Sequence
  Synthetic
cactctcaaca

SEQ ID NO: 184 - DNA, 11 bp, Artificial Sequence
  Synthetic
gcctatctcca

SEQ ID NO: 185-200 - skipped (16 entries)

SEQ ID NO: 201 - protein, 5 aa, Artificial Sequence
  Synthetic
NGRRT

SEQ ID NO: 202 - protein, 5 aa, Artificial Sequence
  Synthetic
NGRRN

SEQ ID NO: 203 - protein, 8 aa, Artificial Sequence
  Synthetic
NNNNGATT

SEQ ID NO: 204 - protein, 4 aa, Artificial Sequence
  Synthetic
NNGG

SEQ ID NO: 205 - protein, 5 aa, Artificial Sequence
  Synthetic
NNNGG

SEQ ID NO: 206 - protein, 7 aa, Artificial Sequence
  Synthetic
NNAGAAW

SEQ ID NO: 207 - protein, 6 aa, Artificial Sequence
  Synthetic
NAAAAC

SEQ ID NO: 208 - protein, 7 aa, Artificial Sequence
  Synthetic
NNNNACA

SEQ ID NO: 209 - protein, 8 aa, Artificial Sequence
  Synthetic
NNNNACAC

SEQ ID NO: 210 - protein, 1368 aa, Artificial Sequence
  Synthetic
MDKKYSIGLAIGTNSVGWAVITDEYKVPSKKFKVLGNTDRHSIKKNLIGALLFDSGETAEATRLKRTARRRYTRRKNRICYLQEIFSNEMAKVDDSFFHRLEESFLVEEDKKHERHPIFGNIVDEVAYHEKYPTIYHLRKKLVDSTDKADLRLIYLALAHMIKFRGHFLIEGDLNPDNSDVDKLFIQLVQTYNQLFEENPINASGVDAKAILSARLSKSRRLENLIAQLPGEKKNGLFGNLIALSLGLTPNFKSNFDLAEDAKLQLSKDTYDDDLDNLLAQIGDQYADLFLAAKNLSDAILLSDILRVNTEITKAPLSASMIKRYDEHHQDLTLLKALVRQQLPEKYKEIFFDQSKNGYAGYIDGGASQEEFYKFIKPILEKMDGTEELLVKLNREDLLRKQRTFDNGSIPHQIHLGELHAILRRQEDFYPFLKDNREKIEKILTFRIPYYVGPLARGNSRFAWMTRKSEETITPWNFEEVVDKGASAQSFIERMTNFDKNLPNEKVLPKHSLLYEYFTVYNELTKVKYVTEGMRKPAFLSGEQKKAIVDLLFKTNRKVTVKQLKEDYFKKIECFDSVEISGVEDRFNASLGTYHDLLKIIKDKDFLDNEENEDILEDIVLTLTLFEDREMIEERLKTYAHLFDDKVMKQLKRRRYTGWGRLSRKLINGIRDKQSGKTILDFLKSDGFANRNFMQLIHDDSLTFKEDIQKAQVSGQGDSLHEHIANLAGSPAIKKGILQTVKVVDELVKVMGRHKPENIVIEMARENQTTQKGQKNSRERMKRIEEGIKELGSQILKEHPVENTQLQNEKLYLYYLQNGRDMYVDQELDINRLSDYDVDHIVPQSFLKDDSIDNKVLTRSDKNRGKSDNVPSEEVVKKMKNYWRQLLNAKLITQRKFDNLTKAERGGLSELDKAGFIKRQLVETRQITKHVAQILDSRMNTKYDENDKLIREVKVITLKSKLVSDFRKDFQFYKVREINNYHHAHDAYLNAVVGTALIKKYPKLESEFVYGDYKVYDVRKMIAKSEQEIGKATAKYFFYSNIMNFFKTEITLANGEIRKRPLIETNGETGEIVWDKGRDFATVRKVLSMPQVNIVKKTEVQTGGFSKESIRPKRNSDKLIARKKDWDPKKYGGFVSPTVAYSVLVVAKVEKGKSKKLKSVKELLGITIMERSSFEKNPIDFLEAKGYKEVKKDLIIKLPKYSLFELENGRKRMLASARFLQKGNELALPSKYVNFLYLASHYEKLKGSPEDNEQKQLFVEQHKHYLDEIIEQISEFSKRVILADANLDKVLSAYNKHRDKPIREQAENIIHLFTLTNLGAPRAFKYFDTTIDRKVYRSTKEVLDATLIHQSITGLYETRIDLSQLGGD

SEQ ID NO: 211 - protein, 6 aa, Artificial Sequence
  Synthetic
NNNRRT

SEQ ID NO: 212 - protein, 1054 aa, Artificial Sequence
  Synthetic
MGKRNYILGLAIGITSVGYGIIDYETRDVIDAGVRLFKEANVENNEGRRSKRGARRLKRRRRHRIQRVKKLLFDYNLLTDHSELSGINPYEARVKGLSQKLSEEEFSAALLHLAKRRGVHNVNEVEEDTGNELSTKEQISRNSKALEEKYVAELQLERLKKDGEVRGSINRFKTSDYVKEAKQLLKVQKAYHQLDQSFIDTYIDLLETRRTYYEGPGEGSPFGWKDIKEWYEMLMGHCTYFPEELRSVKYAYNADLYNALNDLNNLVITRDENEKLEYYEKFQIIENVFKQKKKPTLKQIAKEILVNEEDIKGYRVTSTGKPEFTNLKVYHDIKDITARKEIIENAELLDQIAKILTIYQSSEDIQEELTNLNSELTQEEIEQISNLKGYTGTHNLSLKAINLILDELWHTNDNQIAIFNRLKLVPKKVDLSQQKEIPTTLVDDFILSPVVKRSFIQSIKVINAIIKKYGLPNDIIIELAREKNSKDAQKMINEMQKRNRQTNERIEEIIRTTGKENAKYLIEKIKLHDMQEGKCLYSLEAIPLEDLLNNPFNYEVDHIIPRSVSFDNSFNNKVLVKQEENSKKGNRTPFQYLSSSDSKISYETFKKHILNLAKGKGRISKTKKEYLLEERDINRFSVQKDFINRNLVDTRYATRGLMNLLRSYFRVNNLDVKVKSINGGFTSFLRRKWKFKKERNKGYKHHAEDALIIANADFIFKEWKKLDKAKKVMENQMFEEKQAESMPEIETEQEYKEIFITPHQIKHIKDFKDYKYSHRVDKKPNRKLINDTLYSTRKDDKGNTLIVNNLNGLYDKDNDKLKKLINKSPEKLLMYHHDPQTYQKLKLIMEQYGDEKNPLYKYYEETGNYLTKYSKKDNGPVIKKIKYYGNKLNAHLDITDDYPNSRNKVVKLSLKPYRFDVYLDNGVYKFVTVKNLDVIKKENYYEVNSKCYEEAKKLKKISNQAEFIASFYKNDLIKINGELYRVIGVNNDLLNRIEVNMIDITYREYLENMNDKRPPHIIKTIASKTQSIKKYSTDILGNLYEVKSKKHPQIIKKG

SEQ ID NO: 213 - protein, 6 aa, Artificial Sequence
  Synthetic
NNNRRT

SEQ ID NO: 214 - protein, 1368 aa, Artificial Sequence
  Synthetic
MDKKYSIGLAIGTNSVGWAVITDEYKVPSKKFKVLGNTDRHSIKKNLIGALLFDSGETAEATRLKRTARRRYTRRKNRICYLQEIFSNEMAKVDDSFFHRLEESFLVEEDKKHERHPIFGNIVDEVAYHEKYPTIYHLRKKLVDSTDKADLRLIYLALAHMIKFRGHFLIEGDLNPDNSDVDKLFIQLVQTYNQLFEENPINASGVDAKAILSARLSKSRRLENLIAQLPGEKKNGLFGNLIALSLGLTPNFKSNFDLAEDTKLQLSKDTYDDDLDNLLAQIGDQYADLFLAAKNLSDAILLSDILRVNTEITKAPLSASMIKLYDEHHQDLTLLKALVRQQLPEKYKEIFFDQSKNGYAGYIDGGASQEEFYKFIKPILEKMDGTEELLVKLNREDLLRKQRTFDNGIIPHQIHLGELHAILRRQEDFYPFLKDNREKIEKILTFRIPYYVGPLARGNSRFAWMTRKSEETITPWNFEKVVDKGASAQSFIERMTNFDKNLPNEKVLPKHSLLYEYFTVYNELTKVKYVTEGMRKPAFLSGDQKKAIVDLLFKTNRKVTVKQLKEDYFKKIECFDSVEISGVEDRFNASLGTYHDLLKIIKDKDFLDNEENEDILEDIVLTLTLFEDREMIEERLKTYAHLFDDKVMKQLKRRRYTGWGRLSRKLINGIRDKQSGKTILDFLKSDGFANRNFIQLIHDDSLTFKEDIQKAQVSGQGDSLHEHIANLAGSPAIKKGILQTVKVVDELVKVMGRHKPENIVIEMARENQTTQKGQKNSRERMKRIEEGIKELGSQILKEHPVENTQLQNEKLYLYYLQNGRDMYVDQELDINRLSDYDVDHIVPQSFLKDDSIDNKVLTRSDKNRGKSDNVPSEEVVKKMKNYWRQLLNAKLITQRKFDNLTKAERGGLSELDKAGFIKRQLVETRQITKHVAQILDSRMNTKYDENDKLIREVKVITLKSKLVSDFRKDFQFYKVREINNYHHAHDAYLNAVVGTALIKKYPKLESEFVYGDYKVYDVRKMIAKSEQEIGKATAKYFFYSNIMNFFKTEITLANGEIRKRPLIETNGETGEIVWDKGRDFATVRKVLSMPQVNIVKKTEVQTGGFSKESILPKRNSDKLIARKKDWDPKKYGGFDSPTVAYSVLVVAKVEKGKSKKLKSVKELLGITIMERSSFEKNPIDFLEAKGYKEVKKDLIIKLPKYSLFELENGRKRMLASAGVLQKGNELALPSKYVNFLYLASHYEKLKGSPEDNEQKQLFVEQHKHYLDEIIEQISEFSKRVILADANLDKVLSAYNKHRDKPIREQAENIIHLFTLTNLGAPAAFKYFDTTIDRKRYTSTKEVLDATLIHQSITGLYETRIDLSQLGGD

SEQ ID NO: 215 - protein, 4 aa, Artificial Sequence
  Synthetic
TTTN

SEQ ID NO: 216 - DNA, 125 bp, Artificial Sequence
  Synthetic
  misc_feature (1)..(8): n is a, c, g, or t
nnnnnnnngtttttgtactctcaagatttagaaataaatcttgcagaagctacaaagataaggcttcatgccgaaatcaacaccctgtcattttatggcagggtgttttcgttatttaatttttt

SEQ ID NO: 217 - DNA, 121 bp, Artificial Sequence
  Synthetic
  misc_feature (1)..(18): n is a, c, g, or t
nnnnnnnnnnnnnnnnnngtttttgtactctcagaaatgcagaagctacaaagataaggcttcatgccgaaatcaacaccctgtcattttatggcagggtgttttcgttatttaatttttt

SEQ ID NO: 218 - DNA, 109 bp, Artificial Sequence
  Synthetic
  misc_feature (1)..(20): n is a, c, g, or t
nnnnnnnnnnnnnnnnnnnngtttttgtactctcagaaatgcagaagctacaaagataaggcttcatgccgaaatcaacaccctgtcattttatggcagggtgtttttt

SEQ ID NO: 219 - DNA, 102 bp, Artificial Sequence
  Synthetic
  misc_feature (1)..(20): n is a, c, g, or t
nnnnnnnnnnnnnnnnnnnngttttagagctagaaatagcaagttaaaataaggctagtccgttatcaacttgaaaaagtggcaccgagtcggtgctttttt

SEQ ID NO: 220 - DNA, 87 bp, Artificial Sequence
  Synthetic
  misc_feature (1)..(19): n is a, c, g, or t
nnnnnnnnnnnnnnnnnnngttttagagctagaaatagcaagttaaaataaggctagtccgttatcaacttgaaaaagtgttttttt

SEQ ID NO: 221 - DNA, 76 bp, Artificial Sequence
  Synthetic
  misc_feature (1)..(20): n is a, c, g, or t
nnnnnnnnnnnnnnnnnnnngttttagagctagaaatagcaagttaaaataaggctagtccgttatcatttttttt

SEQ ID NO: 222 - RNA, 91 nt, Artificial Sequence
  Synthetic
guuuuaguacucuguaaugaaaauuacagaaucuacuaaaacaaggcaaaaugccguguuuaucucgucaacuuguuggcgagauuuuuuu

SEQ ID NO: 223 - protein, 6 aa, Artificial Sequence
  Synthetic
NNGRRT

SEQ ID NO: 224 - DNA, 25 bp, Artificial Sequence
  Synthetic
ggtgtttcgtcctttccacaagata

SEQ ID NO: 225 - DNA, 58 bp, Artificial Sequence
  Synthetic
gctgataggcagcctgcactgggttttagtactctgtaatgaaaattacagaatctac

SEQ ID NO: 226 - DNA, 22 bp, Artificial Sequence
  Synthetic
tatgaaccactaaggcgtccac

SEQ ID NO: 227 - DNA, 22 bp, Artificial Sequence
  Synthetic
tcaccagcagactttacgcagc

SEQ ID NO: 228 - DNA, 62 bp, Artificial Sequence
  Synthetic
ggccagatcggaagagcgtcgtgtagggaaagagtgtagatctcggtggtcgccgtatcatt

SEQ ID NO: 229 - DNA, 70 bp, Artificial Sequence
  Synthetic
  misc_feature (25)..(36): n is a, c, g, or t
caagcagaagacggcatacgagatnnnnnnnnnnnngtgactggagttcagacgtgtgctcttccgatct

SEQ ID NO: 230 - DNA, 24 bp, Artificial Sequence
  Synthetic
caagcagaagacggcatacgagat

SEQ ID NO: 231 - DNA, 88 bp, Artificial Sequence
  Synthetic
aatgatacggcgaccaccgagatctacactcgtcggcagcgtcagatgtgtataagagacagtatcccttggagaaccaccttgttgg

SEQ ID NO: 232 - DNA, 67 bp, Artificial Sequence
  Synthetic
agagctagaaatagcaagttaaaataaggctagtccgttatcaacttgaaaaagtggcaccgagtcg

SEQ ID NO: 233 - DNA, 67 bp, Artificial Sequence
  Synthetic
gcaccgactcggtgccactttttcaagttgataacggactagccttattttaacttgctatttctag

SEQ ID NO: 234 - DNA, 30 bp, Artificial Sequence
  Synthetic
caccgctgccatcacgtgctcagtcgtttt

SEQ ID NO: 235 - DNA, 30 bp, Artificial Sequence
  Synthetic
ctctaaaacgactgagcacgtgatggcagc

SEQ ID NO: 236 - DNA, 30 bp, Artificial Sequence
  Synthetic
caccgctggcctgggtcaatccttggtttt

SEQ ID NO: 237 - DNA, 30 bp, Artificial Sequence
  Synthetic
ctctaaaaccaaggattgacccaggccagc

SEQ ID NO: 238 - DNA, 30 bp, Artificial Sequence
  Synthetic
caccgagcgatccaggtgctgcagagtttt

SEQ ID NO: 239 - DNA, 30 bp, Artificial Sequence
  Synthetic
ctctaaaactctgcagcacctggatcgctc

SEQ ID NO: 240 - DNA, 30 bp, Artificial Sequence
  Synthetic
caccgtacacgtctcatatgcccctgtttt

SEQ ID NO: 241 - DNA, 30 bp, Artificial Sequence
  Synthetic
ctctaaaacaggggcatatgagacgtgtac

SEQ ID NO: 242 - DNA, 30 bp, Artificial Sequence
  Synthetic
caccgtgcaccatggtgtctgtttggtttt

SEQ ID NO: 243 - DNA, 30 bp, Artificial Sequence
  Synthetic
ctctaaaaccaaacagacaccatggtgcac

SEQ ID NO: 244 - DNA, 30 bp, Artificial Sequence
  Synthetic
caccgctcaggagtcaggtgcaccagtttt

SEQ ID NO: 245 - DNA, 30 bp, Artificial Sequence
  Synthetic
ctctaaaactggtgcacctgactcctgagc

SEQ ID NO: 246 - DNA, 24 bp, Artificial Sequence
  Synthetic
caccggaatccgttctgcagcacc

SEQ ID NO: 247 - DNA, 24 bp, Artificial Sequence
  Synthetic
aaacggtgctgcagaacggattcc

SEQ ID NO: 248 - DNA, 25 bp, Artificial Sequence
  Synthetic
caccgcgccgtctccaaggtgaaag

SEQ ID NO: 249 - DNA, 25 bp, Artificial Sequence
  Synthetic
aaacctttcaccttggagacggcgc

SEQ ID NO: 250 - DNA, 24 bp, Artificial Sequence
  Synthetic
caccgcagagagtcgccgtctcca

SEQ ID NO: 251 - DNA, 24 bp, Artificial Sequence
  Synthetic
aaactggagacggcgactctctgc

SEQ ID NO: 252 - DNA, 25 bp, Artificial Sequence
  Synthetic
caccgcagagaggcgtatcatttcg

SEQ ID NO: 253 - DNA, 25 bp, Artificial Sequence
  Synthetic
aaaccgaaatgatacgcctctctgc

SEQ ID NO: 254 - DNA, 23 bp, Artificial Sequence
  Synthetic
caccgggctgggcataaaagtca

SEQ ID NO: 255 - DNA, 23 bp, Artificial Sequence
  Synthetic
aaactgacttttatgcccagccc

SEQ ID NO: 256 - DNA, 24 bp, Artificial Sequence
  Synthetic
caccggagggcaggagccagggct

SEQ ID NO: 257 - DNA, 24 bp, Artificial Sequence
  Synthetic
aaacagccctggctcctgccctcc

SEQ ID NO: 258 - DNA, 24 bp, Artificial Sequence
  Synthetic
caccgcaacctgaaacagacacca

SEQ ID NO: 259 - DNA, 24 bp, Artificial Sequence
  Synthetic
aaactggtgtctgtttcaggttgc

SEQ ID NO: 260 - DNA, 24 bp, Artificial Sequence
  Synthetic
caccgacgccctctggaggaagca

SEQ ID NO: 261 - DNA, 24 bp, Artificial Sequence
  Synthetic
aaactgcttcctccagagggcgtc

SEQ ID NO: 262 - DNA, 23 bp, Artificial Sequence
  Synthetic
caccgctgtcctgcgacgccctc

SEQ ID NO: 263 - DNA, 23 bp, Artificial Sequence
  Synthetic
aaacgagggcgtcgcaggacagc

SEQ ID NO: 264 - DNA, 24 bp, Artificial Sequence
  Synthetic
caccgcacatactagcccctgtct

SEQ ID NO: 265 - DNA, 24 bp, Artificial Sequence
  Synthetic
aaacagacaggggctagtatgtgc

SEQ ID NO: 266 - DNA, 24 bp, Artificial Sequence
  Synthetic
caccgtcaaccagtatcccggtgc

SEQ ID NO: 267 - DNA, 24 bp, Artificial Sequence
  Synthetic
aaacgcaccgggatactggttgac

SEQ ID NO: 268 - DNA, 24 bp, Artificial Sequence
  Synthetic
caccgcaagtaagcatgcatttgt

SEQ ID NO: 269 - DNA, 24 bp, Artificial Sequence
  Synthetic
aaacacaaatgcatgcttacttgc

SEQ ID NO: 270 - DNA, 24 bp, Artificial Sequence
  Synthetic
caccggcccagagtgagcacgtga

SEQ ID NO: 271 - DNA, 24 bp, Artificial Sequence
  Synthetic
aaactcacgtgctcactctgggcc

SEQ ID NO: 272 - DNA, 25 bp, Artificial Sequence
  Synthetic
caccgctgccatcacgtgctcactc

SEQ ID NO: 273 - DNA, 25 bp, Artificial Sequence
  Synthetic
aaacgagtgagcacgtgatggcagc

SEQ ID NO: 274 - DNA, 25 bp, Artificial Sequence
  Synthetic
caccgtcaaccattaagcaaaacat

SEQ ID NO: 275 - DNA, 25 bp, Artificial Sequence
  Synthetic
aaacatgttttgcttaatggttgac

SEQ ID NO: 276 - DNA, 25 bp, Artificial Sequence
  Synthetic
caccgtctcaggctgtgcagacaaa

SEQ ID NO: 277 - DNA, 25 bp, Artificial Sequence
  Synthetic
aaactttgtctgcacagcctgagac

SEQ ID NO: 278 - DNA, 25 bp, Artificial Sequence
  Synthetic
caccgaatgactaacatgactgcca

SEQ ID NO: 279 - DNA, 25 bp, Artificial Sequence
  Synthetic
aaactggcagtcatgttagtcattc

SEQ ID NO: 280 - DNA, 23 bp, Artificial Sequence
  Synthetic
gtgcgggcccagagtgagcacgt

SEQ ID NO: 281 - DNA, 23 bp, Artificial Sequence
  Synthetic
aaaaacgtgctcactctgggccc

SEQ ID NO: 282 - DNA, 26 bp, Artificial Sequence
  Synthetic
gtgcttggggcccagagtgagcacgt

SEQ ID NO: 283 - DNA, 26 bp, Artificial Sequence
  Synthetic
aaaaacgtgctcactctgggccccaa

SEQ ID NO: 284 - DNA, 29 bp, Artificial Sequence
  Synthetic
gtgctccttggggcccagagtgagcacgt

SEQ ID NO: 285 - DNA, 29 bp, Artificial Sequence
  Synthetic
aaaaacgtgctcactctgggccccaagga

SEQ ID NO: 286 - DNA, 31 bp, Artificial Sequence
  Synthetic
gtgcaatccttggggcccagagtgagcacgt

SEQ ID NO: 287 - DNA, 31 bp, Artificial Sequence
  Synthetic
aaaaacgtgctcactctgggccccaaggatt

SEQ ID NO: 288 - DNA, 24 bp, Artificial Sequence
  Synthetic
gtgcgggcccagagtgagcacgtg

SEQ ID NO: 289 - DNA, 24 bp, Artificial Sequence
  Synthetic
aaaacacgtgctcactctgggccc

SEQ ID NO: 290 - DNA, 27 bp, Artificial Sequence
  Synthetic
gtgcttggggcccagagtgagcacgtg

SEQ ID NO: 291 - DNA, 27 bp, Artificial Sequence
  Synthetic
aaaacacgtgctcactctgggccccaa

SEQ ID NO: 292 - DNA, 30 bp, Artificial Sequence
  Synthetic
gtgctccttggggcccagagtgagcacgtg

SEQ ID NO: 293 - DNA, 30 bp, Artificial Sequence
  Synthetic
aaaacacgtgctcactctgggccccaagga

SEQ ID NO: 294 - DNA, 32 bp, Artificial Sequence
  Synthetic
gtgcaatccttggggcccagagtgagcacgtg

SEQ ID NO: 295 - DNA, 32 bp, Artificial Sequence
  Synthetic
aaaacacgtgctcactctgggccccaaggatt

SEQ ID NO: 296 - DNA, 26 bp, Artificial Sequence
  Synthetic
gtgcgggcccagagtgagcacgtgat

SEQ ID NO: 297 - DNA, 26 bp, Artificial Sequence
  Synthetic
aaaaatcacgtgctcactctgggccc

SEQ ID NO: 298 - DNA, 29 bp, Artificial Sequence
  Synthetic
gtgcttggggcccagagtgagcacgtgat

SEQ ID NO: 299 - DNA, 29 bp, Artificial Sequence
  Synthetic
aaaaatcacgtgctcactctgggccccaa

SEQ ID NO: 300 - DNA, 32 bp, Artificial Sequence
  Synthetic
gtgctccttggggcccagagtgagcacgtgat

SEQ ID NO: 301 - DNA, 32 bp, Artificial Sequence
  Synthetic
aaaaatcacgtgctcactctgggccccaagga

SEQ ID NO: 302 - DNA, 34 bp, Artificial Sequence
  Synthetic
gtgcaatccttggggcccagagtgagcacgtgat

SEQ ID NO: 303 - DNA, 34 bp, Artificial Sequence
  Synthetic
aaaaatcacgtgctcactctgggccccaaggatt

SEQ ID NO: 304 - DNA, 27 bp, Artificial Sequence
  Synthetic
gtgcgggcccagagtgagcacgtgatg

SEQ ID NO: 305 - DNA, 27 bp, Artificial Sequence
  Synthetic
aaaacatcacgtgctcactctgggccc

SEQ ID NO: 306 - DNA, 30 bp, Artificial Sequence
  Synthetic
gtgcttggggcccagagtgagcacgtgatg

SEQ ID NO: 307 - DNA, 30 bp, Artificial Sequence
  Synthetic
aaaacatcacgtgctcactctgggccccaa

SEQ ID NO: 308 - DNA, 33 bp, Artificial Sequence
  Synthetic
gtgctccttggggcccagagtgagcacgtgatg

SEQ ID NO: 309 - DNA, 33 bp, Artificial Sequence
  Synthetic
aaaacatcacgtgctcactctgggccccaagga

SEQ ID NO: 310 - DNA, 35 bp, Artificial Sequence
  Synthetic
gtgcaatccttggggcccagagtgagcacgtgatg

SEQ ID NO: 311 - DNA, 35 bp, Artificial Sequence
  Synthetic
aaaacatcacgtgctcactctgggccccaaggatt

SEQ ID NO: 312 - DNA, 33 bp, Artificial Sequence
  Synthetic
gtgcgtgctcactctgggccccaaggattgacc

SEQ ID NO: 313 - DNA, 33 bp, Artificial Sequence
  Synthetic
aaaaggtcaatccttggggcccagagtgagcac

SEQ ID NO: 314 - DNA, 35 bp, Artificial Sequence
  Synthetic
gtgcacgtgctcactctgggccccaaggattgacc

SEQ ID NO: 315 - DNA, 35 bp, Artificial Sequence
  Synthetic
aaaaggtcaatccttggggcccagagtgagcacgt

SEQ ID NO: 316 - DNA, 38 bp, Artificial Sequence
  Synthetic
gtgcatcacgtgctcactctgggccccaaggattgacc

SEQ ID NO: 317 - DNA, 38 bp, Artificial Sequence
  Synthetic
aaaaggtcaatccttggggcccagagtgagcacgtgat

SEQ ID NO: 318 - DNA, 35 bp, Artificial Sequence
  Synthetic
gtgcgtgctcactctgggccccaaggattgaccca

SEQ ID NO: 319 - DNA, 35 bp, Artificial Sequence
  Synthetic
aaaatgggtcaatccttggggcccagagtgagcac

SEQ ID NO: 320 - DNA, 37 bp, Artificial Sequence
  Synthetic
gtgcacgtgctcactctgggccccaaggattgaccca

SEQ ID NO: 321 - DNA, 37 bp, Artificial Sequence
  Synthetic
aaaatgggtcaatccttggggcccagagtgagcacgt

SEQ ID NO: 322 - DNA, 40 bp, Artificial Sequence
  Synthetic
gtgcatcacgtgctcactctgggccccaaggattgaccca

SEQ ID NO: 323 - DNA, 40 bp, Artificial Sequence
  Synthetic
aaaatgggtcaatccttggggcccagagtgagcacgtgat

SEQ ID NO: 324 - DNA, 36 bp, Artificial Sequence
  Synthetic
gtgcgtgctcactctgggccccaaggattgacccag

SEQ ID NO: 325 - DNA, 36 bp, Artificial Sequence
  Synthetic
aaaactgggtcaatccttggggcccagagtgagcac

SEQ ID NO: 326 - DNA, 38 bp, Artificial Sequence
  Synthetic
gtgcacgtgctcactctgggccccaaggattgacccag

SEQ ID NO: 327 - DNA, 38 bp, Artificial Sequence
  Synthetic
aaaactgggtcaatccttggggcccagagtgagcacgt

SEQ ID NO: 328 - DNA, 41 bp, Artificial Sequence
  Synthetic
gtgcatcacgtgctcactctgggccccaaggattgacccag

SEQ ID NO: 329 - DNA, 41 bp, Artificial Sequence
  Synthetic
aaaactgggtcaatccttggggcccagagtgagcacgtgat

SEQ ID NO: 330 - DNA, 37 bp, Artificial Sequence
  Synthetic
gtgcgtgctcactctgggccccaaggattgacccagg

SEQ ID NO: 331 - DNA, 37 bp, Artificial Sequence
  Synthetic
aaaacctgggtcaatccttggggcccagagtgagcac

SEQ ID NO: 332 - DNA, 39 bp, Artificial Sequence
  Synthetic
gtgcacgtgctcactctgggccccaaggattgacccagg

SEQ ID NO: 333 - DNA, 39 bp, Artificial Sequence
  Synthetic
aaaacctgggtcaatccttggggcccagagtgagcacgt

SEQ ID NO: 334 - DNA, 42 bp, Artificial Sequence
  Synthetic
gtgcatcacgtgctcactctgggccccaaggattgacccagg

SEQ ID NO: 335 - DNA, 42 bp, Artificial Sequence
  Synthetic
aaaacctgggtcaatccttggggcccagagtgagcacgtgat

SEQ ID NO: 336 - DNA, 24 bp, Artificial Sequence
  Synthetic
gtgcgaatccgttctgcagcacct

SEQ ID NO: 337 - DNA, 24 bp, Artificial Sequence
  Synthetic
aaaaaggtgctgcagaacggattc

SEQ ID NO: 338 - DNA, 27 bp, Artificial Sequence
  Synthetic
gtgcatggaatccgttctgcagcacct

SEQ ID NO: 339 - DNA, 27 bp, Artificial Sequence
  Synthetic
aaaaaggtgctgcagaacggattccat

SEQ ID NO: 340 - DNA, 29 bp, Artificial Sequence
  Synthetic
gtgctcatggaatccgttctgcagcacct

SEQ ID NO: 341 - DNA, 29 bp, Artificial Sequence
  Synthetic
aaaaaggtgctgcagaacggattccatga

SEQ ID NO: 342 - DNA, 32 bp, Artificial Sequence
  Synthetic
gtgcacctcatggaatccgttctgcagcacct

SEQ ID NO: 343 - DNA, 32 bp, Artificial Sequence
  Synthetic
aaaaaggtgctgcagaacggattccatgaggt

SEQ ID NO: 344 - DNA, 25 bp, Artificial Sequence
  Synthetic
gtgcgaatccgttctgcagcacctg

SEQ ID NO: 345 - DNA, 25 bp, Artificial Sequence
  Synthetic
aaaacaggtgctgcagaacggattc

SEQ ID NO: 346 - DNA, 28 bp, Artificial Sequence
  Synthetic
gtgcatggaatccgttctgcagcacctg

SEQ ID NO: 347 - DNA, 28 bp, Artificial Sequence
  Synthetic
aaaacaggtgctgcagaacggattccat

SEQ ID NO: 348 - DNA, 30 bp, Artificial Sequence
  Synthetic
gtgctcatggaatccgttctgcagcacctg

SEQ ID NO: 349 - DNA, 30 bp, Artificial Sequence
  Synthetic
aaaacaggtgctgcagaacggattccatga

SEQ ID NO: 350 - DNA, 33 bp, Artificial Sequence
  Synthetic
gtgcacctcatggaatccgttctgcagcacctg

SEQ ID NO: 351 - DNA, 33 bp, Artificial Sequence
  Synthetic
aaaacaggtgctgcagaacggattccatgaggt

SEQ ID NO: 352 - DNA, 26 bp, Artificial Sequence
  Synthetic
gtgcgaatccgttctgcagcacctgg

SEQ ID NO: 353 - DNA, 26 bp, Artificial Sequence
  Synthetic
aaaaccaggtgctgcagaacggattc

SEQ ID NO: 354 - DNA, 29 bp, Artificial Sequence
  Synthetic
gtgcatggaatccgttctgcagcacctgg

SEQ ID NO: 355 - DNA, 29 bp, Artificial Sequence
  Synthetic
aaaaccaggtgctgcagaacggattccat

SEQ ID NO: 356 - DNA, 31 bp, Artificial Sequence
  Synthetic
gtgctcatggaatccgttctgcagcacctgg

SEQ ID NO: 357 - DNA, 31 bp, Artificial Sequence
  Synthetic
aaaaccaggtgctgcagaacggattccatga

SEQ ID NO: 358 - DNA, 34 bp, Artificial Sequence
  Synthetic
gtgcacctcatggaatccgttctgcagcacctgg

SEQ ID NO: 359 - DNA, 34 bp, Artificial Sequence
  Synthetic
aaaaccaggtgctgcagaacggattccatgaggt

SEQ ID NO: 360 - DNA, 28 bp, Artificial Sequence
  Synthetic
gtgcgaatccgttctgcagcacctggat

SEQ ID NO: 361 - DNA, 28 bp, Artificial Sequence
  Synthetic
aaaaatccaggtgctgcagaacggattc

SEQ ID NO: 362 - DNA, 31 bp, Artificial Sequence
  Synthetic
gtgcatggaatccgttctgcagcacctggat

SEQ ID NO: 363 - DNA, 31 bp, Artificial Sequence
  Synthetic
aaaaatccaggtgctgcagaacggattccat

SEQ ID NO: 364 - DNA, 33 bp, Artificial Sequence
  Synthetic
gtgctcatggaatccgttctgcagcacctggat

SEQ ID NO: 365 - DNA, 33 bp, Artificial Sequence
  Synthetic
aaaaatccaggtgctgcagaacggattccatga

SEQ ID NO: 366 - DNA, 36 bp, Artificial Sequence
  Synthetic
gtgcacctcatggaatccgttctgcagcacctggat

SEQ ID NO: 367 - DNA, 36 bp, Artificial Sequence
  Synthetic
aaaaatccaggtgctgcagaacggattccatgaggt

SEQ ID NO: 368 - DNA, 33 bp, Artificial Sequence
  Synthetic
gtgcgactaacatgactgccaaggggcatatga

SEQ ID NO: 369 - DNA, 33 bp, Artificial Sequence
  Synthetic
aaaatcatatgccccttggcagtcatgttagtc

SEQ ID NO: 370 - DNA, 36 bp, Artificial Sequence
  Synthetic
gtgcaatgactaacatgactgccaaggggcatatga

SEQ ID NO: 371 - DNA, 36 bp, Artificial Sequence
  Synthetic
aaaatcatatgccccttggcagtcatgttagtcatt

SEQ ID NO: 372 - DNA, 39 bp, Artificial Sequence
  Synthetic
gtgcggtaatgactaacatgactgccaaggggcatatga

SEQ ID NO: 373 - DNA, 39 bp, Artificial Sequence
  Synthetic
aaaatcatatgccccttggcagtcatgttagtcattacc

SEQ ID NO: 374 - DNA, 42 bp, Artificial Sequence
  Synthetic
gtgctcaggtaatgactaacatgactgccaaggggcatatga

SEQ ID NO: 375 - DNA, 42 bp, Artificial Sequence
  Synthetic
aaaatcatatgccccttggcagtcatgttagtcattacctga

SEQ ID NO: 376 - DNA, 34 bp, Artificial Sequence
  Synthetic
gtgcgactaacatgactgccaaggggcatatgag

SEQ ID NO: 377 - protein, 1053 aa, Staphylococcus aureus
MGKRNYILGLDIGITSVGYGIIDYETRDVIDAGVRLFKEANVENNEGRRSKRGARRLKRRRRHRIQRVKKLLFDYNLLTDHSELSGINPYEARVKGLSQKLSEEEFSAALLHLAKRRGVHNVNEVEEDTGNELSTKEQISRNSKALEEKYVAELQLERLKKDGEVRGSINRFKTSDYVKEAKQLLKVQKAYHQLDQSFIDTYIDLLETRRTYYEGPGEGSPFGWKDIKEWYEMLMGHCTYFPEELRSVKYAYNADLYNALNDLNNLVITRDENEKLEYYEKFQIIENVFKQKKKPTLKQIAKEILVNEEDIKGYRVTSTGKPEFTNLKVYHDIKDITARKEIIENAELLDQIAKILTIYQSSEDIQEELTNLNSELTQEEIEQISNLKGYTGTHNLSLKAINLILDELWHTNDNQIAIFNRLKLVPKKVDLSQQKEIPTTLVDDFILSPVVKRSFIQSIKVINAIIKKYGLPNDIIIELAREKNSKDAQKMINEMQKRNRQTNERIEEIIRTTGKENAKYLIEKIKLHDMQEGKCLYSLEAIPLEDLLNNPFNYEVDHIIPRSVSFDNSFNNKVLVKQEENSKKGNRTPFQYLSSSDSKISYETFKKHILNLAKGKGRISKTKKEYLLEERDINRFSVQKDFINRNLVDTRYATRGLMNLLRSYFRVNNLDVKVKSINGGFTSFLRRKWKFKKERNKGYKHHAEDALIIANADFIFKEWKKLDKAKKVMENQMFEEKQAESMPEIETEQEYKEIFITPHQIKHIKDFKDYKYSHRVDKKPNRKLINDTLYSTRKDDKGNTLIVNNLNGLYDKDNDKLKKLINKSPEKLLMYHHDPQTYQKLKLIMEQYGDEKNPLYKYYEETGNYLTKYSKKDNGPVIKKIKYYGNKLNAHLDITDDYPNSRNKVVKLSLKPYRFDVYLDNGVYKFVTVKNLDVIKKENYYEVNSKCYEEAKKLKKISNQAEFIASFYKNDLIKINGELYRVIGVNNDLLNRIEVNMIDITYREYLENMNDKRPPHIIKTIASKTQSIKKYSTDILGNLYEVKSKKHPQIIKK

SEQ ID NO: 378 - protein, 1082 aa, N. meningitidis
MAAFKPNSINYILGLDIGIASVGWAMVEIDEEENPIRLIDLGVRVFERAEVPKTGDSLAMARRLARSVRRLTRRRAHRLLRTRRLLKREGVLQAANFDENGLIKSLPNTPWQLRAAALDRKLTPLEWSAVLLHLIKHRGYLSQRKNEGETADKELGALLKGVAGNAHALQTGDFRTPAELALNKFEKESGHIRNQRSDYSHTFSRKDLQAELILLFEKQKEFGNPHVSGGLKEGIETLLMTQRPALSGDAVQKMLGHCTFEPAEPKAAKNTYTAERFIWLTKLNNLRILEQGSERPLTDTERATLMDEPYRKSKLTYAQARKLLGLEDTAFFKGLRYGKDNAEASTLMEMKAYHAISRALEKEGLKDKKSPLNLSPELQDEIGTAFSLFKTDEDITGRLKDRIQPEILEALLKHISFDKFVQISLKALRRIVPLMEQGKRYDEACAEIYGDHYGKKNTEEKIYLPPIPADEIRNPVVLRALSQARKVINGVVRRYGSPARIHIETAREVGKSFKDRKEIEKRQEENRKDREKAAAKFREYFPNFVGEPKSKDILKLRLYEQQHGKCLYSGKEINLGRLNEKGYVEIDAALPFSRTWDDSFNNKVLVLGSENQNKGNQTPYEYFNGKDNSREWQEFKARVETSRFPRSKKQRILLQKFDEDGFKERNLNDTRYVNRFLCQFVADRMRLTGKGKKRVFASNGQITNLLRGFWGLRKVRAENDRHHALDAVVVACSTVAMQQKITRFVRYKEMNAFDGKTIDKETGEVLHQKTHFPQPWEFFAQEVMIRVFGKPDGKPEFEEADTLEKLRTLLAEKLSSRPEAVHEYVTPLFVSRAPNRKMSGQGHMETVKSAKRLDEGVSVLRVPLTQLKLKDLEKMVNREREPKLYEALKARLEAHKDDPAKAFAEPFYKYDKAGNRTQQVKAVRVEQVQKTGVWVRNHNGIADNATMVRVDVFEKGDKYYLVPIYSWQVAKGILPDRAVVQGKDEEDWQLIDDSFNFKFSLHPNDLVEVITKKARMFGYFASCHRGTGNINIRIHDLDHKIGKNGILEGIGVKTALSFQKYQIDELGKEIRPCRLKKRPPVR

SEQ ID NO: 379 - protein, 984 aa, C. jejuni
MARILAFDIGISSIGWAFSENDELKDCGVRIFTKVENPKTGESLALPRRLARSARKRLARRKARLNHLKHLIANEFKLNYEDYQSFDESLAKAYKGSLISPYELRFRALNELLSKQDFARVILHIAKRRGYDDIKNSDDKEKGAILKAIKQNEEKLANYQSVGEYLYKEYFQKFKENSKEFTNVRNKKESYERCIAQSFLKDELKLIFKKQREFGFSFSKKFEEEVLSVAFYKRALKDFSHLVGNCSFFTDEKRAPKNSPLAFMFVALTRIINLLNNLKNTEGILYTKDDLNALLNEVLKNGTLTYKQTKKLLGLSDDYEFKGEKGTYFIEFKKYKEFIKALGEHNLSQDDLNEIAKDITLIKDEIKLKKALAKYDLNQNQIDSLSKLEFKDHLNISFKALKLVTPLMLEGKKYDEACNELNLKVAINEDKKDFLPAFNETYYKDEVTNPVVLRAIKEYRKVLNALLKKYGKVHKINIELAREVGKNHSQRAKIEKEQNENYKAKKDAELECEKLGLKINSKNILKLRLFKEQKEFCAYSGEKIKISDLQDEKMLEIDHIYPYSRSFDDSYMNKVLVFTKQNQEKLNQTPFEAFGNDSAKWQKIEVLAKNLPTKKQKRILDKNYKDKEQKNFKDRNLNDTRYIARLVLNYTKDYLDFLPLSDDENTKLNDTQKGSKVHVEAKSGMLTSALRHTWGFSAKDRNNHLHHAIDAVIIAYANNSIVKAFSDFKKEQESNSAELYAKKISELDYKNKRKFFEPFSGFRQKVLDKIDEIFVSKPERKKPSGALHEETFRKEEEFYQSYGGKEGVLKALELGKIRKVNGKIVKNGDMFRVDIFKHKKTNKFYAVPIYTMDFALKVLPNKAVARSKKGEIKDWILMDENYEFCFSLYKDSLILIQTKDMQEPEFVYYNAFTSSTVSLIVSKHDNKFETLSKNQKILFKNANEKEVIAKSIGIQNLKVFEKYIVSALGEVTKAEFRQREDFKK

SEQ ID NO: 380 - protein, 1087 aa, G. stearothermophilus
MRYKIGLDIGITSVGWAVMNLDIPRIEDLGVRIFDRAENPQTGESLALPRRLARSARRRLRRRKHRLERIRRLVIREGILTKEELDKLFEEKHEIDVWQLRVEALDRKLNNDELARVLLHLAKRRGFKSNRKSERSNKENSTMLKHIEENRAILSSYRTVGEMIVKDPKFALHKRNKGENYTNTIARDDLEREIRLIFSKQREFGNMSCTEEFENEYITIWASQRPVASKDDIEKKVGFCTFEPKEKRAPKATYTFQSFIAWEHINKLRLISPSGARGLTDEERRLLYEQAFQKNKITYHDIRTLLHLPDDTYFKGIVYDRGESRKQNENIRFLELDAYHQIRKAVDKVYGKGKSSSFLPIDFDTFGYALTLFKDDADIHSYLRNEYEQNGKRMPNLANKVYDNELIEELLNLSFTKFGHLSLKALRSILPYMEQGEVYSSACERAGYTFTGPKKKQKTMLLPNIPPIANPVVMRALTQARKVVNAIIKKYGSPVSIHIELARDLSQTFDERRKTKKEQDENRKKNETAIRQLMEYGLTLNPTGHDIVKFKLWSEQNGRCAYSLQPIEIERLLEPGYVEVDHVIPYSRSLDDSYTNKVLVLTRENREKGNRIPAEYLGVGTERWQQFETFVLTNKQFSKKKRDRLLRLHYDENEETEFKNRNLNDTRYISRFFANFIREHLKFAESDDKQKVYTVNGRVTAHLRSRWEFNKNREESDLHHAVDAVIVACTTPSDIAKVTAFYQRREQNKELAKKTEPHFPQPWPHFADELRARLSKHPKESIKALNLGNYDDQKLESLQPVFVSRMPKRSVTGAAHQETLRRYVGIDERSGKIQTVVKTKLSEIKLDASGHFPMYGKESDPRTYEAIRQRLLEHNNDPKKAFQEPLYKPKKNGEPGPVIRTVKIIDTKNQVIPLNDGKTVAYNSNIVRVDVFEKDGKYYCVPVYTMDIMKGILPNKAIEPNKPYSEWKEMTEDYTFRFSLYPNDLIRIELPREKTVKTAAGEEINVKDVFVYYKTIDSANGGLELISHDHRFSLRGVGSRTLKRFEKYQVDVLGNIYKVRGEKRVGLASSAHSKPGKTIRPLQSTRD

SEQ ID NO: 381 - protein, 1228 aa, L. bacterium
MSKLEKFTNCYSLSKTLRFKAIPVGKTQENIDNKRLLVEDEKRAEDYKGVKKLLDRYYLSFINDVLHSIKLKNLNNYISLFRKKTRTEKENKELENLEINLRKEIAKAFKGNEGYKSLFKKDIIETILPEFLDDKDEIALVNSFNGFTTAFTGFFDNRENMFSEEAKSTSIAFRCINENLTRYISNMDIFEKVDAIFDKHEVQEIKEKILNSDYDVEDFFEGEFFNFVLTQEGIDVYNAIIGGFVTESGEKIKGLNEYINLYNQKTKQKLPKFKPLYKQVLSDRESLSFYGEGYTSDEEVLEVFRNTLNKNSEIFSSIKKLEKLFKNFDEYSSAGIFVKNGPAISTISKDIFGEWNVIRDKWNAEYDDIHLKKKAVVTEKYEDDRRKSFKKIGSFSLEQLQEYADADLSVVEKLKEIIIQKVDEIYKVYGSSEKLFDADFVLEKSLKKNDAVVAIMKDLLDSVKSFENYIKAFFGEGKETNRDESFYGDFVLAYDILLKVDHIYDAIRNYVTQKPYSKDKFKLYFQNPQFMGGWDKDKETDYRATILRYGSKYYLAIMDKKYAKCLQKIDKDDVNGNYEKINYKLLPGPNKMLPKVFFSKKWMAYYNPSEDIQKIYKNGTFKKGDMFNLNDCHKLIDFFKDSISRYPKWSNAYDFNFSETEKYKDIAGFYREVEEQGYKVSFESASKKEVDKLVEEGKLYMFQIYNKDFSDKSHGTPNLHTMYFKLLFDENNHGQIRLSGGAELFMRRASLKKEELVVHPANSPIANKNPDNPKKTTTLSYDVYKDKRFSEDQYELHIPIAINKCPKNIFKINTEVRVLLKHDDNPYVIGIDRGERNLLYIVVVDGKGNIVEQYSLNEIINNFNGIRIKTDYHSLLDKKEKERFEARQNWTSIENIKELKAGYISQVVHKICELVEKYDAVIALEDLNSGFKNSRVKVEKQVYQKFEKMLIDKLNYMVDKKSNPCATGGALKGYQITNKFESFKSMSTQNGFIFYIPAWLTSKIDPSTGFVNLLKTKYTSIADSKKFISSFDRIMYVPEEDLFEFALDYKNFSRTDADYIKKWKLYSYGNRIRIFRNPKKNNVFDWEEVCLTSAYKELFNKYGINYQQGDIRALLCEQSDKAFYSSFMALMSLMLQMRNSITGRTDVDFLISPVKNSDGIFYDSRNYEAQENAILPKNADANGAYNIARKVLWAIGQFKKAEDEKLDKVKIAISNKEWLEYAQTSVKH

SEQ ID NO: 382 - protein, 1108 aa, B. hisashii
MATRSFILKIEPNEEVKKGLWKTHEVLNHGIAYYMNILKLIRQEAIYEHHEQDPKNPKKVSKAEIQAELWDFVLKMQKCNSFTHEVDKDEVFNILRELYEELVPSSVEKKGEANQLSNKFLYPLVDPNSQSGKGTASSGRKPRWYNLKIAGDPSWEEEKKKWEEDKKKDPLAKILGKLAEYGLIPLFIPYTDSNEPIVKEIKWMEKSRNQSVRRLDKDMFIQALERFLSWESWNLKVKEEYEKVEKEYKTLEERIKEDIQALKALEQYEKERQEQLLRDTLNTNEYRLSKRGLRGWREIIQKWLKMDENEPSEKYLEVFKDYQRKHPREAGDYSVYEFLSKKENHFIWRNHPEYPYLYATFCEIDKKKKDAKQQATFTLADPINHPLWVRFEERSGSNLNKYRILTEQLHTEKLKKKLTVQLDRLIYPTESGGWEEKGKVDIVLLPSRQFYNQIFLDIEEKGKHAFTYKDESIKFPLKGTLGGARVQFDRDHLRRYPHKVESGNVGRIYFNMTVNIEPTESPVSKSLKIHRDDFPKVVNFKPKELTEWIKDSKGKKLKSGIESLEIGLRVMSIDLGQRQAAAASIFEVVDQKPDIEGKLFFPIKGTELYAVHRASFNIKLPGETLVKSREVLRKAREDNLKLMNQKLNFLRNVLHFQQFEDITEREKRVTKWISRQENSDVPLVYQDELIQIRELMYKPYKDWVAFLKQLHKRLEVEIGKEVKHWRKSLSDGRKGLYGISLKNIDEIDRTRKFLLRWSLRPTEPGEVRRLEPGQRFAIDQLNHLNALKEDRLKKMANTIIMHALGYCYDVRKKKWQAKNPACQIILFEDLSNYNPYEERSRFENSKLMKWSRREIPRQVALQGEIYGLQVGEVGAQFSSRFHAKTGSPGIRCSVVTKEKLQDNRFFKNLQREGRLTLDKIAVLKEGDLYPDKGGEKFISLSKDRKCVTTHADINAAQNLQKRFWTRTHGFYKVYCKAYQVDGQTVYIPESKDQKQKIIEEFGEGYFILKDGVYEWVNAGKLKIKKGSSKQSSSELVDSDILKDSFDLASELKGEKLMLYRDPSGNVFPSDKWMAAGVFFGKLERILISKLTNQYSISTIEDDSSKQSM

SEQ ID NO: 383 - protein, 1307 aa, Unknown
  Acidaminococcus sp. (strain BV3L6)
MTQFEGFTNLYQVSKTLRFELIPQGKTLKHIQEQGFIEEDKARNDHYKELKPIIDRIYKTYADQCLQLVQLDWENLSAAIDSYRKEKTEETRNALIEEQATYRNAIHDYFIGRTDNLTDAINKRHAEIYKGLFKAELFNGKVLKQLGTVTTTEHENALLRSFDKFTTYFSGFYENRKNVFSAEDISTAIPHRIVQDNFPKFKENCHIFTRLITAVPSLREHFENVKKAIGIFVSTSIEEVFSFPFYNQLLTQTQIDLYNQLLGGISREAGTEKIKGLNEVLNLAIQKNDETAHIIASLPHRFIPLFKQILSDRNTLSFILEEFKSDEEVIQSFCKYKTLLRNENVLETAEALFNELNSIDLTHIFISHKKLETISSALCDHWDTLRNALYERRISELTGKITKSAKEKVQRSLKHEDINLQEIISAAGKELSEAFKQKTSEILSHAHAALDQPLPTTLKKQEEKEILKSQLDSLLGLYHLLDWFAVDESNEVDPEFSARLTGIKLEMEPSLSFYNKARNYATKKPYSVEKFKLNFQMPTLASGWDVNKEKNNGAILFVKNGLYYLGIMPKQKGRYKALSFEPTEKTSEGFDKMYYDYFPDAAKMIPKCSTQLKAVTAHFQTHTTPILLSNNFIEPLEITKEIYDLNNPEKEPKKFQTAYAKKTGDQKGYREALCKWIDFTRDFLSKYTKTTSIDLSSLRPSSQYKDLGEYYAELNPLLYHISFQRIAEKEIMDAVETGKLYLFQIYNKDFAKGHHGKPNLHTLYWTGLFSPENLAKTSIKLNGQAELFYRPKSRMKRMAHRLGEKMLNKKLKDQKTPIPDTLYQELYDYVNHRLSHDLSDEARALLPNVITKEVSHEIIKDRRFTSDKFFFHVPITLNYQAANSPSKFNQRVNAYLKEHPETPIIGIDRGERNLIYITVIDSTGKILEQRSLNTIQQFDYQKKLDNREKERVAARQAWSVVGTIKDLKQGYLSQVIHEIVDLMIHYQAVVVLENLNFGFKSKRTGIAEKAVYQQFEKMLIDKLNCLVLKDYPAEKVGGVLNPYQLTDQFTSFAKMGTQSGFLFYVPAPYTSKIDPLTGFVDPFVWKTIKNHESRKHFLEGFDFLHYDVKTGDFILHFKMNRNLSFQRGLPGFMPAWDIVFEKNETQFDAKGTPFIAGKRIVPVIENHRFTGRYRDLYPANELIALLEEKGIVFRDGSNILPKLLENDDSHAIDTMVALIRSVLQMRNSNAATGEDYINSPVRDLNGVCFDSRFQNPEWPMDADANGAYHIALKGQLLLNHLKESKDLKLQNGISNQDWLAYIQELRN

SEQ ID NO: 384 - protein, 1307 aa, Artificial Sequence
  Synthetic
MTQFEGFTNLYQVSKTLRFELIPQGKTLKHIQEQGFIEEDKARNDHYKELKPIIDRIYKTYADQCLQLVQLDWENLSAAIDSYRKEKTEETRNALIEEQATYRNAIHDYFIGRTDNLTDAINKRHAEIYKGLFKAELFNGKVLKQLGTVTTTEHENALLRSFDKFTTYFSGFYENRKNVFSAEDISTAIPHRIVQDNFPKFKENCHIFTRLITAVPSLREHFENVKKAIGIFVSTSIEEVFSFPFYNQLLTQTQIDLYNQLLGGISREAGTEKIKGLNEVLNLAIQKNDETAHIIASLPHRFIPLFKQILSDRNTLSFILEEFKSDEEVIQSFCKYKTLLRNENVLETAEALFNELNSIDLTHIFISHKKLETISSALCDHWDTLRNALYERRISELTGKITKSAKEKVQRSLKHEDINLQEIISAAGKELSEAFKQKTSEILSHAHAALDQPLPTTLKKQEEKEILKSQLDSLLGLYHLLDWFAVDESNEVDPEFSARLTGIKLEMEPSLSFYNKARNYATKKPYSVEKFKLNFQMPTLASGWDVNKEKNNGAILFVKNGLYYLGIMPKQKGRYKALSFEPTEKTSEGFDKMYYDYFPDAAKMIPKCSTQLKAVTAHFQTHTTPILLSNNFIEPLEITKEIYDLNNPEKEPKKFQTAYAKKTGDQKGYREALCKWIDFTRDFLSKYTKTTSIDLSSLRPSSQYKDLGEYYAELNPLLYHISFQRIAEKEIMDAVETGKLYLFQIYNKDFAKGHHGKPNLHTLYWTGLFSPENLAKTSIKLNGQAELFYRPKSRMKRMAHRLGEKMLNKKLKDQKTPIPDTLYQELYDYVNHRLSHDLSDEARALLPNVITKEVSHEIIKDRRFTSDKFFFHVPITLNYQAANSPSKFNQRVNAYLKEHPETPIIGIDRGERNLIYITVIDSTGKILEQRSLNTIQQFDYQKKLDNREKERVAARQAWSVVGTIKDLKQGYLSQVIHEIVDLMIHYQAVVVLENLNFGFKSKRTGIAEKAVYQQFEKMLIDKLNCLVLKDYPAEKVGGVLNPYQLTDQFTSFAKMGTQSGFLFYVPAPYTSKIDPLTGFVDPFVWKTIKNHESRKHFLEGFDFLHYDVKTGDFILHFKMNRNLSFQRGLPGFMPAWDIVFEKNETQFDAKGTPFIAGKRIVPVIENHRFTGRYRDLYPANELIALLEEKGIVFRDGSNILPKLLENDDSHAIDTMVALIRSVLQMANSNAATGEDYINSPVRDLNGVCFDSRFQNPEWPMDADANGAYHIALKGQLLLNHLKESKDLKLQNGISNQDWLAYIQELRN

SEQ ID NO: 385 - protein, 1259 aa, Unknown
  Lachnospiraceae bacterium GAM79
MNYKTGLEDFIGKESLSKTLRNALIPTESTKIHMEEMGVIRDDELRAEKQQELKEIMDDYYRTFIEEKLGQIQGIQWNSLFQKMEETMEDISVRKDLDKIQNEKRKEICCYFTSDKRFKDLFNAKLITDILPNFIKDNKEYTEEEKAEKEQTRVLFQRFATAFTNYFNQRRNNFSEDNISTAISFRIVNENSEIHLQNMRAFQRIEQQYPEEVCGMEEEYKDMLQEWQMKHIYSVDFYDRELTQPGIEYYNGICGKINEHMNQFCQKNRINKNDFRMKKLHKQILCKKSSYYEIPFRFESDQEVYDALNEFIKTMKKKEIIRRCVHLGQECDDYDLGKIYISSNKYEQISNALYGSWDTIRKCIKEEYMDALPGKGEKKEEKAEAAAKKEEYRSIADIDKIISLYGSEMDRTISAKKCITEICDMAGQISIDPLVCNSDIKLLQNKEKTTEIKTILDSFLHVYQWGQTFIVSDIIEKDSYFYSELEDVLEDFEGITTLYNHVRSYVTQKPYSTVKFKLHFGSPTLANGWSQSKEYDNNAILLMRDQKFYLGIFNVRNKPDKQIIKGHEKEEKGDYKKMIYNLLPGPSKMLPKVFITSRSGQETYKPSKHILDGYNEKRHIKSSPKFDLGYCWDLIDYYKECIHKHPDWKNYDFHFSDTKDYEDISGFYREVEMQGYQIKWTYISADEIQKLDEKGQIFLFQIYNKDFSVHSTGKDNLHTMYLKNLFSEENLKDIVLKLNGEAELFFRKASIKTPIVHKKGSVLVNRSYTQTVGNKEIRVSIPEEYYTEIYNYLNHIGKGKLSSEAQRYLDEGKIKSFTATKDIVKNYRYCCDHYFLHLPITINFKAKSDVAVNERTLAYIAKKEDIHIIGIDRGERNLLYISVVDVHGNIREQRSFNIVNGYDYQQKLKDREKSRDAARKNWEEIEKIKELKEGYLSMVIHYIAQLVVKYNAVVAMEDLNYGFKTGRFKVERQVYQKFETMLIEKLHYLVFKDREVCEEGGVLRGYQLTYIPESLKKVGKQCGFIFYVPAGYTSKIDPTTGFVNLFSFKNLTNRESRQDFVGKFDEIRYDRDKKMFEFSFDYNNYIKKGTILASTKWKVYTNGTRLKRIVVNGKYTSQSMEVELTDAMEKMLQRAGIEYHDGKDLKGQIVEKGIEAEIIDIFRLTVQMRNSRSESEDREYDRLISPVLNDKGEFFDTATADKTLPQDADANGAYCIALKGLYEVKQIKENWKENEQFPRNKLVQDNKTWFDFMQKKRYL

SEQ ID NO: 386 - protein, 1306 aa, Prevotella copri
MAKNFEDFKRLYSLSKTLRFEAKPIGATLDNIVKSGLLDEDEHRAASYVKVKKLIDEYHKVFIDRVLDDGCLPLENKGNNNSLAEYYESYVSRAQDEDAKKKFKEIQQNLRSVIAKKLTEDKAYANLFGNKLIESYKDKEDKKKIIDSDLIQFINTAESTQLDSMSQDEAKELVKEFWGFVTYFYGFFDNRKNMYTAEEKSTGIAYRLVNENLPKFIDNIEAFNRAITRPEIQENMGVLYSDFSEYLNVESIQEMFQLDYYNMLLTQKQIDVYNAIIGGKTDDEHDVKIKGINEYINLYNQQHKDDKLPKLKALFKQILSDRNAISWLPEEFNSDQEVLNAIKDCYERLAENVLGDKVLKSLLGSLADYSLDGIFIRNDLQLTDISQKMFGNWGVIQNAIMQNIKRVAPARKHKESEEDYEKRIAGIFKKADSFSISYINDCLNEADPNNAYFVENYFATFGAVNTPTMQRENLFALVQNAYTEVAALLHSDYPTVKHLAQDKANVSKIKALLDAIKSLQHFVKPLLGKGDESDKDERFYGELASLWAELDTVTPLYNMIRNYMTRKPYSQKKIKLNFENPQLLGGWDANKEKDYATIILRRNGLYYLAIMDKDSRKLLGKAMPSDGECYEKMVYKFFKDVTTMIPKCSTQLKDVQAYFKVNTDDYVLNSKAFNKPLTITKEVFDLNNVLYGKYKKFQKGYLTATGDNVGYTHAVNVWIKFCMDFLNSYDSTCIYDFSSLKPESYLSLDAFYQDANLLLYKLSFARASVSYINQLVEEGKMYLFQIYNKDFSEYSKGTPNMHTLYWKALFDERNLADVVYKLNGQAEMFYRKKSIENTHPTHPANHPILNKNKDNKKKESLFDYDLIKDRRYTVDKFMFHVPITMNFKSVGSENINQDVKAYLRHADDMHIIGIDRGERHLLYLVVIDLQGNIKEQYSLNEIVNEYNGNTYHTNYHDLLDVREEERLKARQSWQTIENIKELKEGYLSQVIHKITQLMVRYHAIVVLEDLSKGFMRSRQKVEKQVYQKFEKMLIDKLNYLVDKKTDVSTPGGLLNAYQLTCKSDSSQKLGKQSGFLFYIPAWNTSKIDPVTGFVNLLDTHSLNSKEKIKAFFSKFDAIRYNKDKKWFEFNLDYDKFGKKAEDTRTKWTLCTRGMRIDTFRNKEKNSQWDNQEVDLTTEMKSLLEHYYIDIHGNLKDAISAQTDKAFFTGLLHILKLTLQMRNSITGTETDYLVSPVADENGIFYDSRSCGNQLPENADANGAYNIARKGLMLIEQIKNAEDLNNVKFDISNKAWLNFAQQKPYKNG

SEQ ID NO: 387 - protein, 1142 aa, Eubacterium rectale
MFSAKLISDILPEFVIHNNNYSASEKEEKTQVIKLFSRFATSFKDYFKNRANCFSANDISSSSCHRIVNDNAEIFFSNALVYRRIVKNLSNDDINKISGDMKDSLKEMSLEEIYSYEKYGEFITQEGISFYNDICGKVNLFMNLYCQKNKENKNLYKLRKLHKQILCIADTSYEVPYKFESDEEVYQSVNGFLDNISSKHIVERLRKIGENYNGYNLDKIYIVSKFYESVSQKTYRDWETINTALEIHYNNILPGNGKSKADKVKKAVKNDLQKSITEINELVSNYKLCPDDNIKAETYIHEISHILNNFEAQELKYNPEIHLVESELKASELKNVLDVIMNAFHWCSVFMTEELVDKDNNFYAELEEIYDEIYPVISLYNLVRNYVTQKPYSTKKIKLNFGIPTLADGWSKSKEYSNNAIILMRDNLYYLGIFNAKNKPDKKIIEGNTSENKGDYKKMIYNLLPGPNKMIPKVFLSSKTGVETYKPSAYILEGYKQNKHLKSSKDFDITFCHDLIDYFKNCIAIHPEWKNFGFDFSDTSTYEDISGFYREVELQGYKIDWTYISEKDIDLLQEKGQLYLFQIYNKDFSKKSSGNDNLHTMYLKNLFSEENLKDIVLKLNGEAEIFFRKSSIKNPIIHKKGSILVNRTYEAEEKDQFGNIQIVRKTIPENIYQELYKYFNDKSDKELSDEAAKLKNVVGHHEAATNIVKDYRYTYDKYFLHMPITINFKANKTSFINDRILQYIAKEKDLHVIGIDRGERNLIYVSVIDTCGNIVEQKSFNIVNGYDYQIKLKQQEGARQIARKEWKEIGKIKEIKEGYLSLVIHEISKMVIKYNAIIAMEDLSYGFKKGRFKVERQVYQKFETMLINKLNYLVFKDISITENGGLLKGYQLTYIPDKLKNVGHQCGCIFYVPAAYTSKIDPTTGFVNIFKFKDLTVDAKREFIKKFDSIRYDSDKNLFCFTFDYNNFITQNTVMSKSSWSVYTYGVRIKRRFVNGRFSNESDTIDITKDMEKTLEMTDINWRDGHDLRQDIIDYEIVQHIFEIFKLTVQMRNSLSELEDRDYDRLISPVLNENNIFYDSAKAGDALPKDADANGAYCIALKGLYEIKQITENWKEDGKFSRDKLKISNKDWFDFIQNKRYL

SEQ ID NO: 388 - protein, 1259 aa, Unknown
  Clostridium sp. AF34-10BH
MNYKTGLEDFIGKESLSKTLRNALIPTESTKIHMEEMGVIRDDELRAEKQQELKEIMDDYYRAFIEEKLGQIQGIQWNSLFQKMEETMEDISVRKDLDKIQNEKRKEICCYFTSDKRFKDLFNAKLITDILPNFIKDNKEYTEEEKAEKEQTRVLFQRFATAFTNYFNQRRNNFSEDNISTAISFRIVNENSEIHLQNMRAFQRIEQQYPEEVCGMEEEYKDMLQEWQMKHIYLVDFYDRVLTQPGIEYYNGICGKINEHMNQFCQKNRINKNDFRMKKLHKQILCKKSSYYEIPFRFESDQEVYDALNEFIKTMKEKEIICRCVHLGQKCDDYDLGKIYISSNKYEQISNALYGSWDTIRKCIKEEYMDALPGKGEKKEEKAEAAAKKEEYRSIADIDKIISLYGSEMDRTISAKKCITEICDMAGQISTDPLVCNSDIKLLQNKEKTTEIKTILDSFLHVYQWGQTFIVSDIIEKDSYFYSELEDVLEDFEGITTLYNHVRSYVTQKPYSTVKFKLHFGSPTLANGWSQSKEYDNNAILLMRDQKFYLGIFNVRNKPDKQIIKGHEKEEKGDYKKMIYNLLPGPSKMLPKVFITSRSGQETYKPSKHILDGYNEKRHIKSSPKFDLGYCWDLIDYYKECIHKHPDWKNYDFHFSDTKDYEDISGFYREVEMQGYQIKWTYISADEIQKLDEKGQIFLFQIYNKDFSVHSTGKDNLHTMYLKNLFSEENLKDIVLKLNGEAELFFRKASIKTPVVHKKGSVLVNRSYTQTVGDKEIRVSIPEEYYTEIYNYLNHIGRGKLSTEAQRYLEERKIKSFTATKDIVKNYRYCCDHYFLHLPITINFKAKSDIAVNERTLAYIAKKEDIHIIGIDRGERNLLYISVVDVHGNIREQRSFNIVNGYDYQQKLKDREKSRDAARKNWEEIEKIKELKEGYLSMVIHYIAQLVVKYNAVVAMEDLNYGFKTGRFKVERQVYQKFETMLIEKLHYLVFKDREVCEEGGVLRGYQLTYIPESLKKVGKQCGFIFYVPAGYTSKIDPTTGFVNLFSFKNLTNRESRQDFVGKFDEIRYDRDKKMFEFSFDYNNYIKKGTMLASTKWKVYTNGTRLKRIVVNGKYTSQSMEVELTDAMEKMLQRAGIEYHDGKDLKGQIVEKGIEAEIIDIFRLTVQMRNSRSESEDREYDRLISPVLNDKGEFFDTATADKTLPQDADANGAYCIALKGLYEVKQIKENWKENEQFPRNKLVQDNKTWFDFMQKKRYL

SEQ ID NO: 389 - protein, 1108 aa, Bacillus hisashii; identical to SEQ ID NO: 382

SEQ ID NO: 390 - protein, 1465 aa, Thermomonas hydrothermalis
MSEKTTQRAYTLRLNRASGECAVCQNNSCDCWHDALWATHKAVNRGAKAFGDWLLTLRGGLCHTLVEMEVPAKGNNPPQRPTDQERRDRRVLLALSWLSVEDEHGAPKEFIVATGRDSADDRAKKVEEKLREILEKRDFQEHEIDAWLQDCGPSLKAHIREDAVWVNRRALFDAAVERIKTLTWEEAWDFLEPFFGTQYFAGIGDGKDKDDAEGPARQGEKAKDLVQKAGQWLSARFGIGTGADFMSMAEAYEKIAKWASQAQNGDNGKATIEKLACALRPSEPPTLDTVLKCISGPGHKSATREYLKTLDKKSTVTQEDLNQLRKLADEDARNCRKKVGKKGKKPWADEVLKDVENSCELTYLQDNSPARHREFSVMLDHAARRVSMAHSWIKKAEQRRRQFESDAQKLKNLQERAPSAVEWLDRFCESRSMTTGANTGSGYRIRKRAIEGWSYVVQAWAEASCDTEDKRIAAARKVQADPEIEKFGDIQLFEALAADEAICVWRDQEGTQNPSILIDYVTGKTAEHNQKRFKVPAYRHPDELRHPVFCDFGNSRWSIQFAIHKEIRDRDKGAKQDTRQLQNRHGLKMRLWNGRSMTDVNLHWSSKRLTADLALDQNPNPNPTEVTRADRLGRAASSAFDHVKIKNVFNEKEWNGRLQAPRAELDRIAKLEEQGKTEQAEKLRKRLRWYVSFSPCLSPSGPFIVYAGQHNIQPKRSGQYAPHAQANKGRARLAQLILSRLPDLRILSVDLGHRFAAACAVWETLSSDAFRREIQGLNVLAGGSGEGDLFLHVEMTGDDGKRRTVVYRRIGPDQLLDNTPHPAPWARLDRQFLIKLQGEDEGVREASNEELWTVHKLEVEVGRTVPLIDRMVRSGFGKTEKQKERLKKLRELGWISAMPNEPSAETDEKEGEIRSISRSVDELMSSALGTLRLALKRHGNRARIAFAMTADYKPMPGGQKYYFHEAKEASKNDDETKRRDNQIEFLQDALSLWHDLFSSPDWEDNEAKKLWQNHIATLPNYQTPEEISAELKRVERNKKRKENRDKLRTAAKALAENDQLRQHLHDTWKERWESDDQQWKERLRSLKDWIFPRGKAEDNPSIRHVGGLSITRINTISGLYQILKAFKMRPEPDDLRKNIPQKGDDELENFNRRLLEARDRLREQRVKQLASRIIEAALGVGRIKIPKNGKLPKRPRTTVDTPCHAVVIESLKTYRPDDLRTRRENRQLMQWSSAKVRKYLKEGCELYGLHFLEVPANYTSRQCSRTGLPGIRCDDVPTGDFLKAPWWRRAINTAREKNGGDAKDRFLVDLYDHLNNLQSKGEALPATVRVPRQGGNLFIAGAQLDDTNKERRAIQADLNAAANIGLRALLDPDWRGRWWYVPCKDGTSEPALDRIEGSTAFNDVRSLPTGDNSSRRAPREIENLWRDPSGDSLESGTWSPTRAYWDTVQSRVIELLRRHAGLPTS

SEQ ID NO: 391 - protein, 1090 aa, Laceyella sacchari
MSIRSFKLKLKTKSGVNAEQLRRGLWRTHQLINDGIAYYMNWLVLLRQEDLFIRNKETNEIEKRSKEEIQAVLLERVHKQQQRNQWSGEVDEQTLLQALRQLYEEIVPSVIGKSGNASLKARFFLGPLVDPNNKTTKDVSKSGPTPKWKKMKDAGDPNWVQEYEKYMAERQTLVRLEEMGLIPLFPMYTDEVGDIHWLPQASGYTRTWDRDMFQQAIERLLSWESWNRRVRERRAQFEKKTHDFASRFSESDVQWMNKLREYEAQQEKSLEENAFAPNEPYALTKKALRGWERVYHSWMRLDSAASEEAYWQEVATCQTAMRGEFGDPAIYQFLAQKENHDIWRGYPERVIDFAELNHLQRELRRAKEDATFTLPDSVDHPLWVRYEAPGGTNIHGYDLVQDTKRNLTLILDKFILPDENGSWHEVKKVPFSLAKSKQFHRQVWLQEEQKQKKREVVFYDYSTNLPHLGTLAGAKLQWDRNFLNKRTQQQIEETGEIGKVFFNISVDVRPAVEVKNGRLQNGLGKALTVLTHPDGTKIVTGWKAEQLEKWVGESGRVSSLGLDSLSEGLRVMSIDLGQRTSATVSVFEITKEAPDNPYKFFYQLEGTEMFAVHQRSFLLALPGENPPQKIKQMREIRWKERNRIKQQVDQLSAILRLHKKVNEDERIQAIDKLLQKVASWQLNEEIATAWNQALSQLYSKAKENDLQWNQAIKNAHHQLEPVVGKQISLWRKDLSTGRQGIAGLSLWSIEELEATKKLLTRWSKRSREPGVVKRIERFETFAKQIQHHINQVKENRLKQLANLIVMTALGYKYDQEQKKWIEVYPACQVVLFENLRSYRFSFERSRRENKKLMEWSHRSIPKLVQMQGELFGLQVADVYAAYSSRYHGRTGAPGIRCHALTEADLRNETNIIHELIEAGFIKEEHRPYLQQGDLVPWSGGELFATLQKPYDNPRILTLHADINAAQNIQKRFWHPSMWFRVNCESVMEGEIVTYVPKNKTVHKKQGKTFRFVKVEGSDVYEWAKWSKNRNKNTFSSITERKPPSSMILFRDPSGTFFKEQEWVEQKTFWGKVQSMIQAYMKKTIVQRMEE

SEQ ID NO: 392 - protein, 1194 aa, Dsulfonatronum thiodismutans
MVLGRKDDTAELRRALWTTHEHVNLAVAEVERVLLRCRGRSYWTLDRRGDPVHVPESQVAEDALAMAREAQRRNGWPVVGEDEEILLALRYLYEQIVPSCLLDDLGKPLKGDAQKIGTNYAGPLFDSDTCRRDEGKDVACCGPFHEVAGKYLGALPEWATPISKQEFDGKDASHLRFKATGGDDAFFRVSIEKANAWYEDPANQDALKNKAYNKDDWKKEKDKGISSWAVKYIQKQLQLGQDPRTEVRRKLWLELGLLPLFIPVFDKTMVGNLWNRLAVRLALAHLLSWESWNHRAVQDQALARAKRDELAALFLGMEDGFAGLREYELRRNESIKQHAFEPVDRPYVVSGRALRSWTRVREEWLRHGDTQESRKNICNRLQDRLRGKFGDPDVFHWLAEDGQEALWKERDCVTSFSLLNDADGLLEKRKGYALMTFADARLHPRWAMYEAPGGSNLRTYQIRKTENGLWADVVLLSPRNESAAVEEKTFNVRLAPSGQLSNVSFDQIQKGSKMVGRCRYQSANQQFEGLLGGAEILFDRKRIANEQHGATDLASKPGHVWFKLTLDVRPQAPQGWLDGKGRPALPPEAKHFKTALSNKSKFADQVRPGLRVLSVDLGVRSFAACSVFELVRGGPDQGTYFPAADGRTVDDPEKLWAKHERSFKITLPGENPSRKEEIARRAAMEELRSLNGDIRRLKAILRLSVLQEDDPRTEHLRLFMEAIVDDPAKSALNAELFKGFGDDRFRSTPDLWKQHCHFFHDKAEKVVAERFSRWRTETRPKSSSWQDWRERRGYAGGKSYWAVTYLEAVRGLILRWNMRGRTYGEVNRQDKKQFGTVASALLHHINQLKEDRIKTGADMIIQAARGFVPRKNGAGWVQVHEPCRLILFEDLARYRFRTDRSRRENSRLMRWSHREIVNEVGMQGELYGLHVDTTEAGFSSRYLASSGAPGVRCRHLVEEDFHDGLPGMHLVGELDWLLPKDKDRTANEARRLLGGMVRPGMLVPWDGGELFATLNAASQLHVIHADINAAQNLQRRFWGRCGEAIRIVCNQLSVDGSTRYEMAKAPKARLLGALQQLKNGDAPFHLTSIPNSQKPENSYVMTPTNAGKKYRAGPGEKSSGEEDELALDIVEQAEELAQGRKTFFRDPSGVFFAPDRWLPSEIYWSRIRRRIWQVTLERNSSGRQERAEMDEMPY

SEQ ID NO: 393 - DNA, 34 bp, Artificial Sequence
  Synthetic
aaaactcatatgccccttggcagtcatgttagtc

SEQ ID NO: 394 - DNA, 37 bp, Artificial Sequence
  Synthetic
gtgcaatgactaacatgactgccaaggggcatatgag

SEQ ID NO: 395 - DNA, 37 bp, Artificial Sequence
  Synthetic
aaaactcatatgccccttggcagtcatgttagtcatt

SEQ ID NO: 396 - protein, 1387 aa, Artificial Sequence
  Synthetic
DYKVYDVRKMIAKSEQEIGKATAKYFFYSNIMNFFKTEITLANGEIRKRPLIETNGETGEIVWDKGRDFATVRKVLSMPQVNIVKKTEVQTGGFSKESILPKRNSDKLIARKKDWDPKKYGGFDSPTVAYSVLVVAKVEKGKSKKLKSVKELLGITIMERSSFEKNPIDFLEAKGYKEVKKDLIIKLPKYSLFELENGRKRMLASAGELQKGNELALPSKYVNFLYLASHYEKLKGSPEDNEQKQLFVEQHKHYLDEIIEQISEFSKRVILADANLDKVLSAYNKHRDKPIREQAENIIHLFTLTNLGAPAAFKYFDTTIDRKRYTSTKEVLDATLIHQSITGLYETRIDLSQLGGDGGSGGSGGSGGSGGSGGSGGDKKYSIGLAIGTNSVGWAVITDEYKVPSKKFKVLGNTDRHSIKKNLIGALLFDSGETAEATRLKRTARRRYTRRKNRICYLQEIFSNEMAKVDDSFFHRLEESFLVEEDKKHERHPIFGNIVDEVAYHEKYPTIYHLRKKLVDSTDKADLRLIYLALAHMIKFRGHFLIEGDLNPDNSDVDKLFIQLVQTYNQLFEENPINASGVDAKAILSARLSKSRRLENLIAQLPGEKKNGLFGNLIALSLGLTPNFKSNFDLAEDAKLQLSKDTYDDDLDNLLAQIGDQYADLFLAAKNLSDAILLSDILRVNTEITKAPLSASMIKRYDEHHQDLTLLKALVRQQLPEKYKEIFFDQSKNGYAGYIDGGASQEEFYKFIKPILEKMDGTEELLVKLNREDLLRKQRTFDNGSIPHQIHLGELHAILRRQEDFYPFLKDNREKIEKILTFRIPYYVGPLARGNSRFAWMTRKSEETITPWNFEEVVDKGASAQSFIERMTNFDKNLPNEKVLPKHSLLYEYFTVYNELTKVKYVTEGMRKPAFLSGEQKKAIVDLLFKTNRKVTVKQLKEDYFKKIECFDSVEISGVEDRFNASLGTYHDLLKIIKDKDFLDNEENEDILEDIVLTLTLFEDREMIEERLKTYAHLFDDKVMKQLKRRRYTGWGRLSRKLINGIRDKQSGKTILDFLKSDGFANRNFMQLIHDDSLTFKEDIQKAQVSGQGDSLHEHIANLAGSPAIKKGILQTVKVVDELVKVMGRHKPENIVIEMARENQTTQKGQKNSRERMKRIEEGIKELGSQILKEHPVENTQLQNEKLYLYYLQNGRDMYVDQELDINRLSDYDVDHIVPQSFLKDDSIDNKVLTRSDKNRGKSDNVPSEEVVKKMKNYWRQLLNAKLITQRKFDNLTKAERGGLSELDKAGFIKRQLVETRQITKHVAQILDSRMNTKYDENDKLIREVKVITLKSKLVSDFRKDFQFYKVREINNYHHAHDAYLNAVVGTALIKKYPKLESEFVYG

SEQ ID NO: 397 - protein, 1388 aa, Artificial Sequence
  Synthetic
EIGKATAKYFFYSNIMNFFKTEITLANGEIRKRPLIETNGETGEIVWDKGRDFATVRKVLSMPQVNIVKKTEVQTGGFSKESILPKRNSDKLIARKKDWDPKKYGGFDSPTVAYSVLVVAKVEKGKSKKLKSVKELLGITIMERSSFEKNPIDFLEAKGYKEVKKDLIIKLPKYSLFELENGRKRMLASAGELQKGNELALPSKYVNFLYLASHYEKLKGSPEDNEQKQLFVEQHKHYLDEIIEQISEFSKRVILADANLDKVLSAYNKHRDKPIREQAENIIHLFTLTNLGAPAAFKYFDTTIDRKRYTSTKEVLDATLIHQSITGLYETRIDLSQLGGDGGSGGSGGSGGSGGSGGSGGMDKKYSIGLAIGTNSVGWAVITDEYKVPSKKFKVLGNTDRHSIKKNLIGALLFDSGETAEATRLKRTARRRYTRRKNRICYLQEIFSNEMAKVDDSFFHRLEESFLVEEDKKHERHPIFGNIVDEVAYHEKYPTIYHLRKKLVDSTDKADLRLIYLALAHMIKFRGHFLIEGDLNPDNSDVDKLFIQLVQTYNQLFEENPINASGVDAKAILSARLSKSRRLENLIAQLPGEKKNGLFGNLIALSLGLTPNFKSNFDLAEDAKLQLSKDTYDDDLDNLLAQIGDQYADLFLAAKNLSDAILLSDILRVNTEITKAPLSASMIKRYDEHHQDLTLLKALVRQQLPEKYKEIFFDQSKNGYAGYIDGGASQEEFYKFIKPILEKMDGTEELLVKLNREDLLRKQRTFDNGSIPHQIHLGELHAILRRQEDFYPFLKDNREKIEKILTFRIPYYVGPLARGNSRFAWMTRKSEETITPWNFEEVVDKGASAQSFIERMTNFDKNLPNEKVLPKHSLLYEYFTVYNELTKVKYVTEGMRKPAFLSGEQKKAIVDLLFKTNRKVTVKQLKEDYFKKIECFDSVEISGVEDRFNASLGTYHDLLKIIKDKDFLDNEENEDILEDIVLTLTLFEDREMIEERLKTYAHLFDDKVMKQLKRRRYTGWGRLSRKLINGIRDKQSGKTILDFLKSDGFANRNFMQLIHDDSLTFKEDIQKAQVSGQGDSLHEHIANLAGSPAIKKGILQTVKVVDELVKVMGRHKPENIVIEMARENQTTQKGQKNSRERMKRIEEGIKELGSQILKEHPVENTQLQNEKLYLYYLQNGRDMYVDQELDINRLSDYDVDHIVPQSFLKDDSIDNKVLTRSDKNRGKSDNVPSEEVVKKMKNYWRQLLNAKLITQRKFDNLTKAERGGLSELDKAGFIKRQLVETRQITKHVAQILDSRMNTKYDENDKLIREVKVITLKSKLVSDFRKDFQFYKVREINNYHHAHDAYLNAVVGTALIKKYPKLESEFVYGDYKVYDVRKMIAKSEQ

SEQ ID NO: 398 - protein, 1387 aa, Artificial Sequence
  Synthetic
NIMNFFKTEITLANGEIRKRPLIETNGETGEIVWDKGRDFATVRKVLSMPQVNIVKKTEVQTGGFSKESILPKRNSDKLIARKKDWDPKKYGGFDSPTVAYSVLVVAKVEKGKSKKLKSVKELLGITIMERSSFEKNPIDFLEAKGYKEVKKDLIIKLPKYSLFELENGRKRMLASAGELQKGNELALPSKYVNFLYLASHYEKLKGSPEDNEQKQLFVEQHKHYLDEIIEQISEFSKRVILADANLDKVLSAYNKHRDKPIREQAENIIHLFTLTNLGAPAAFKYFDTTIDRKRYTSTKEVLDATLIHQSITGLYETRIDLSQLGGDGGSGGSGGSGGSGGSGGSGGDKKYSIGLAIGTNSVGWAVITDEYKVPSKKFKVLGNTDRHSIKKNLIGALLFDSGETAEATRLKRTARRRYTRRKNRICYLQEIFSNEMAKVDDSFFHRLEESFLVEEDKKHERHPIFGNIVDEVAYHEKYPTIYHLRKKLVDSTDKADLRLIYLALAHMIKFRGHFLIEGDLNPDNSDVDKLFIQLVQTYNQLFEENPINASGVDAKAILSARLSKSRRLENLIAQLPGEKKNGLFGNLIALSLGLTPNFKSNFDLAEDAKLQLSKDTYDDDLDNLLAQIGDQYADLFLAAKNLSDAILLSDILRVNTEITKAPLSASMIKRYDEHHQDLTLLKALVRQQLPEKYKEIFFDQSKNGYAGYIDGGASQEEFYKFIKPILEKMDGTEELLVKLNREDLLRKQRTFDNGSIPHQIHLGELHAILRRQEDFYPFLKDNREKIEKILTFRIPYYVGPLARGNSRFAWMTRKSEETITPWNFEEVVDKGASAQSFIERMTNFDKNLPNEKVLPKHSLLYEYFTVYNELTKVKYVTEGMRKPAFLSGEQKKAIVDLLFKTNRKVTVKQLKEDYFKKIECFDSVEISGVEDRFNASLGTYHDLLKIIKDKDFLDNEENEDILEDIVLTLTLFEDREMIEERLKTYAHLFDDKVMKQLKRRRYTGWGRLSRKLINGIRDKQSGKTILDFLKSDGFANRNFMQLIHDDSLTFKEDIQKAQVSGQGDSLHEHIANLAGSPAIKKGILQTVKVVDELVKVMGRHKPENIVIEMARENQTTQKGQKNSRERMKRIEEGIKELGSQILKEHPVENTQLQNEKLYLYYLQNGRDMYVDQELDINRLSDYDVDHIVPQSFLKDDSIDNKVLTRSDKNRGKSDNVPSEEVVKKMKNYWRQLLNAKLITQRKFDNLTKAERGGLSELDKAGFIKRQLVETRQITKHVAQILDSRMNTKYDENDKLIREVKVITLKSKLVSDFRKDFQFYKVREINNYHHAHDAYLNAVVGTALIKKYPKLESEFVYGDYKVYDVRKMIAKSEQEIGKATAKYFFYS

SEQ ID NO: 399 - protein, 1388 aa, Artificial Sequence
  Synthetic
PEDNEQKQLFVEQHKHYLDEIIEQISEFSKRVILADANLDKVLSAYNKHRDKPIREQAENIIHLFTLTNLGAPAAFKYFDTTIDRKRYTSTKEVLDATLIHQSITGLYETRIDLSQLGGDGGSGGSGGSGGSGGSGGSGGMDKKYSIGLAIGTNSVGWAVITDEYKVPSKKFKVLGNTDRHSIKKNLIGALLFDSGETAEATRLKRTARRRYTRRKNRICYLQEIFSNEMAKVDDSFFHRLEESFLVEEDKKHERHPIFGNIVDEVAYHEKYPTIYHLRKKLVDSTDKADLRLIYLALAHMIKFRGHFLIEGDLNPDNSDVDKLFIQLVQTYNQLFEENPINASGVDAKAILSARLSKSRRLENLIAQLPGEKKNGLFGNLIALSLGLTPNFKSNFDLAEDAKLQLSKDTYDDDLDNLLAQIGDQYADLFLAAKNLSDAILLSDILRVNTEITKAPLSASMIKRYDEHHQDLTLLKALVRQQLPEKYKEIFFDQSKNGYAGYIDGGASQEEFYKFIKPILEKMDGTEELLVKLNREDLLRKQRTFDNGSIPHQIHLGELHAILRRQEDFYPFLKDNREKIEKILTFRIPYYVGPLARGNSRFAWMTRKSEETITPWNFEEVVDKGASAQSFIERMTNFDKNLPNEKVLPKHSLLYEYFTVYNELTKVKYVTEGMRKPAFLSGEQKKAIVDLLFKTNRKVTVKQLKEDYFKKIECFDSVEISGVEDRFNASLGTYHDLLKIIKDKDFLDNEENEDILEDIVLTLTLFEDREMIEERLKTYAHLFDDKVMKQLKRRRYTGWGRLSRKLINGIRDKQSGKTILDFLKSDGFANRNFMQLIHDDSLTFKEDIQKAQVSGQGDSLHEHIANLAGSPAIKKGILQTVKVVDELVKVMGRHKPENIVIEMARENQTTQKGQKNSRERMKRIEEGIKELGSQILKEHPVENTQLQNEKLYLYYLQNGRDMYVDQELDINRLSDYDVDHIVPQSFLKDDSIDNKVLTRSDKNRGKSDNVPSEEVVKKMKNYWRQLLNAKLITQRKFDNLTKAERGGLSELDKAGFIKRQLVETRQITKHVAQILDSRMNTKYDENDKLIREVKVITLKSKLVSDFRKDFQFYKVREINNYHHAHDAYLNAVVGTALIKKYPKLESEFVYGDYKVYDVRKMIAKSEQEIGKATAKYFFYSNIMNFFKTEITLANGEIRKRPLIETNGETGEIVWDKGRDFATVRKVLSMPQVNIVKKTEVQTGGFSKESILPKRNSDKLIARKKDWDPKKYGGFDSPTVAYSVLVVAKVEKGKSKKLKSVKELLGITIMERSSFEKNPIDFLEAKGYKEVKKDLIIKLPKYSLFELENGRKRMLASAGELQKGNELALPSKYVNFLYLASHYEKLKGS

SEQ ID NO: 400 - protein, 1387 aa, Artificial Sequence
  Synthetic
KPIREQAENIIHLFTLTNLGAPAAFKYFDTTIDRKRYTSTKEVLDATLIHQSITGLYETRIDLSQLGGDGGSGGSGGSGGSGGSGGSGGDKKYSIGLAIGTNSVGWAVITDEYKVPSKKFKVLGNTDRHSIKKNLIGALLFDSGETAEATRLKRTARRRYTRRKNRICYLQEIFSNEMAKVDDSFFHRLEESFLVEEDKKHERHPIFGNIVDEVAYHEKYPTIYHLRKKLVDSTDKADLRLIYLALAHMIKFRGHFLIEGDLNPDNSDVDKLFIQLVQTYNQLFEENPINASGVDAKAILSARLSKSRRLENLIAQLPGEKKNGLFGNLIALSLGLTPNFKSNFDLAEDAKLQLSKDTYDDDLDNLLAQIGDQYADLFLAAKNLSDAILLSDILRVNTEITKAPLSASMIKRYDEHHQDLTLLKALVRQQLPEKYKEIFFDQSKNGYAGYIDGGASQEEFYKFIKPILEKMDGTEELLVKLNREDLLRKQRTFDNGSIPHQIHLGELHAILRRQEDFYPFLKDNREKIEKILTFRIPYYVGPLARGNSRFAWMTRKSEETITPWNFEEVVDKGASAQSFIERMTNFDKNLPNEKVLPKHSLLYEYFTVYNELTKVKYVTEGMRKPAFLSGEQKKAIVDLLFKTNRKVTVKQLKEDYFKKIECFDSVEISGVEDRFNASLGTYHDLLKIIKDKDFLDNEENEDILEDIVLTLTLFEDREMIEERLKTYAHLFDDKVMKQLKRRRYTGWGRLSRKLINGIRDKQSGKTILDFLKSDGFANRNFMQLIHDDSLTFKEDIQKAQVSGQGDSLHEHIANLAGSPAIKKGILQTVKVVDELVKVMGRHKPENIVIEMARENQTTQKGQKNSRERMKRIEEGIKELGSQILKEHPVENTQLQNEKLYLYYLQNGRDMYVDQELDINRLSDYDVDHIVPQSFLKDDSIDNKVLTRSDKNRGKSDNVPSEEVVKKMKNYWRQLLNAKLITQRKFDNLTKAERGGLSELDKAGFIKRQLVETRQITKHVAQILDSRMNTKYDENDKLIREVKVITLKSKLVSDFRKDFQFYKVREINNYHHAHDAYLNAVVGTALIKKYPKLESEFVYGDYKVYDVRKMIAKSEQEIGKATAKYFFYSNIMNFFKTEITLANGEIRKRPLIETNGETGEIVWDKGRDFATVRKVLSMPQVNIVKKTEVQTGGFSKESILPKRNSDKLIARKKDWDPKKYGGFDSPTVAYSVLVVAKVEKGKSKKLKSVKELLGITIMERSSFEKNPIDFLEAKGYKEVKKDLIIKLPKYSLFELENGRKRMLASAGELQKGNELALPSKYVNFLYLASHYEKLKGSPEDNEQKQLFVEQHKHYLDEIIEQISEFSKRVILADANLDKVLSAYNKHRD

SEQ ID NO: 401 - protein, 357 aa, Artificial Sequence
  Synthetic
DYKVYDVRKMIAKSEQEIGKATAKYFFYSNIMNFFKTEITLANGEIRKRPLIETNGETGEIVWDKGRDFATVRKVLSMPQVNIVKKTEVQTGGFSKESILPKRNSDKLIARKKDWDPKKYGGFDSPTVAYSVLVVAKVEKGKSKKLKSVKELLGITIMERSSFEKNPIDFLEAKGYKEVKKDLIIKLPKYSLFELENGRKRMLASAGELQKGNELALPSKYVNFLYLASHYEKLKGSPEDNEQKQLFVEQHKHYLDEIIEQISEFSKRVILADANLDKVLSAYNKHRDKPIREQAENIIHLFTLTNLGAPAAFKYFDTTIDRKRYTSTKEVLDATLIHQSITGLYETRIDLSQLGGD

SEQ ID NO: 402 - protein, 341 aa, Artificial Sequence
  Synthetic
EIGKATAKYFFYSNIMNFFKTEITLANGEIRKRPLIETNGETGEIVWDKGRDFATVRKVLSMPQVNIVKKTEVQTGGFSKESILPKRNSDKLIARKKDWDPKKYGGFDSPTVAYSVLVVAKVEKGKSKKLKSVKELLGITIMERSSFEKNPIDFLEAKGYKEVKKDLIIKLPKYSLFELENGRKRMLASAGELQKGNELALPSKYVNFLYLASHYEKLKGSPEDNEQKQLFVEQHKHYLDEIIEQISEFSKRVILADANLDKVLSAYNKHRDKPIREQAENIIHLFTLTNLGAPAAFKYFDTTIDRKRYTSTKEVLDATLIHQSITGLYETRIDLSQLGGD

SEQ ID NO: 403 - protein, 328 aa, Artificial Sequence
  Synthetic
NIMNFFKTEITLANGEIRKRPLIETNGETGEIVWDKGRDFATVRKVLSMPQVNIVKKTEVQTGGFSKESILPKRNSDKLIARKKDWDPKKYGGFDSPTVAYSVLVVAKVEKGKSKKLKSVKELLGITIMERSSFEKNPIDFLEAKGYKEVKKDLIIKLPKYSLFELENGRKRMLASAGELQKGNELALPSKYVNFLYLASHYEKLKGSPEDNEQKQLFVEQHKHYLDEIIEQISEFSKRVILADANLDKVLSAYNKHRDKPIREQAENIIHLFTLTNLGAPAAFKYFDTTIDRKRYTSTKEVLDATLIHQSITGLYETRIDLSQLGGD

SEQ ID NO: 404 - protein, 120 aa, Artificial Sequence
  Synthetic
PEDNEQKQLFVEQHKHYLDEIIEQISEFSKRVILADANLDKVLSAYNKHRDKPIREQAENIIHLFTLTNLGAPAAFKYFDTTIDRKRYTSTKEVLDATLIHQSITGLYETRIDLSQLGGD

SEQ ID NO: 405 - protein, 69 aa, Artificial Sequence
  Synthetic
KPIREQAENIIHLFTLTNLGAPAAFKYFDTTIDRKRYTSTKEVLDATLIHQSITGLYETRIDLSQLGGD

SEQ ID NO: 406 - DNA, 40 bp, Artificial Sequence
  Synthetic
gtgcggtaatgactaacatgactgccaaggggcatatgag

SEQ ID NO: 407 - DNA, 40 bp, Artificial Sequence
  Synthetic
aaaactcatatgccccttggcagtcatgttagtcattacc

SEQ ID NO: 408 - DNA, 43 bp, Artificial Sequence
  Synthetic
gtgctcaggtaatgactaacatgactgccaaggggcatatgag

SEQ ID NO: 409 - DNA, 43 bp, Artificial Sequence
  Synthetic
aaaactcatatgccccttggcagtcatgttagtcattacctga

SEQ ID NO: 410 - DNA, 36 bp, Artificial Sequence
  Synthetic
gtgcgactaacatgactgccaaggggcatatgagac

SEQ ID NO: 411 - DNA, 36 bp, Artificial Sequence
  Synthetic
aaaagtctcatatgccccttggcagtcatgttagtc

SEQ ID NO: 412 - DNA, 39 bp, Artificial Sequence
  Synthetic
gtgcaatgactaacatgactgccaaggggcatatgagac

SEQ ID NO: 413 - DNA, 39 bp, Artificial Sequence
  Synthetic
aaaagtctcatatgccccttggcagtcatgttagtcatt

SEQ ID NO: 414 - DNA, 42 bp, Artificial Sequence
  Synthetic
gtgcggtaatgactaacatgactgccaaggggcatatgagac

SEQ ID NO: 415 - DNA, 42 bp, Artificial Sequence
  Synthetic
aaaagtctcatatgccccttggcagtcatgttagtcattacc

SEQ ID NO: 416 - DNA, 45 bp, Artificial Sequence
  Synthetic
gtgctcaggtaatgactaacatgactgccaaggggcatatgagac

SEQ ID NO: 417 - DNA, 45 bp, Artificial Sequence
  Synthetic
aaaagtctcatatgccccttggcagtcatgttagtcattacctga

SEQ ID NO: 418 - DNA, 38 bp, Artificial Sequence
  Synthetic
gtgcgactaacatgactgccaaggggcatatgagacgt

SEQ ID NO: 419 - DNA, 38 bp, Artificial Sequence
  Synthetic
aaaaacgtctcatatgccccttggcagtcatgttagtc

SEQ ID NO: 420 - DNA, 41 bp, Artificial Sequence
  Synthetic
gtgcaatgactaacatgactgccaaggggcatatgagacgt

SEQ ID NO: 421 - DNA, 41 bp, Artificial Sequence
  Synthetic
aaaaacgtctcatatgccccttggcagtcatgttagtcatt

SEQ ID NO: 422 - DNA, 44 bp, Artificial Sequence
  Synthetic
gtgcggtaatgactaacatgactgccaaggggcatatgagacgt

SEQ ID NO: 423 - DNA, 44 bp, Artificial Sequence
  Synthetic
aaaaacgtctcatatgccccttggcagtcatgttagtcattacc

SEQ ID NO: 424 - DNA, 47 bp, Artificial Sequence
  Synthetic
gtgctcaggtaatgactaacatgactgccaaggggcatatgagacgt

SEQ ID NO: 425 - DNA, 47 bp, Artificial Sequence
  Synthetic
aaaaacgtctcatatgccccttggcagtcatgttagtcattacctga

SEQ ID NO: 426 - DNA, 23 bp, Artificial Sequence
  Synthetic
gtgcgcaacctgaaacagacacc

SEQ ID NO: 427 - DNA, 23 bp, Artificial Sequence
  Synthetic
aaaaggtgtctgtttcaggttgc

SEQ ID NO: 428 - DNA, 25 bp, Artificial Sequence
  Synthetic
gtgctagcaacctgaaacagacacc

SEQ ID NO: 429 - DNA, 25 bp, Artificial Sequence
  Synthetic
aaaaggtgtctgtttcaggttgcta

SEQ ID NO: 430 - DNA, 27 bp, Artificial Sequence
  Synthetic
gtgcactagcaacctgaaacagacacc

SEQ ID NO: 431 - DNA, 27 bp, Artificial Sequence
  Synthetic
aaaaggtgtctgtttcaggttgctagt

SEQ ID NO: 432 - DNA, 31 bp, Artificial Sequence
  Synthetic
gtgcgttcactagcaacctgaaacagacacc

SEQ ID NO: 433 - DNA, 31 bp, Artificial Sequence
  Synthetic
aaaaggtgtctgtttcaggttgctagtgaac

SEQ ID NO: 434 - DNA, 25 bp, Artificial Sequence
  Synthetic
gtgcgcaacctgaaacagacaccat

SEQ ID NO: 435 - DNA, 25 bp, Artificial Sequence
  Synthetic
aaaaatggtgtctgtttcaggttgc

SEQ ID NO: 436 - protein, 1368 aa, Artificial Sequence
  Synthetic
MDKKYSIGLDIGTNSVGWAVITDEYKVPSKKFKVLGNTDRHSIKKNLIGALLFDSGETAEATRLKRTARRRYTRRKNRICYLQEIFSNEMAKVDDSFFHRLEESFLVEEDKKHERHPIFGNIVDEVAYHEKYPTIYHLRKKLVDSTDKADLRLIYLALAHMIKFRGHFLIEGDLNPDNSDVDKLFIQLVQTYNQLFEENPINASGVDAKAILSARLSKSRRLENLIAQLPGEKKNGLFGNLIALSLGLTPNFKSNFDLAEDAKLQLSKDTYDDDLDNLLAQIGDQYADLFLAAKNLSDAILLSDILRVNTEITKAPLSASMVKRYDEHHQDLTLLKALVRQQLPEKYKEIFFDQSKNGYAGYIDGGASQEEFYKFIKPILEKMDGTEELLVKLNREDLLRKQRTFDNGIIPHQIHLGELHAILRRQGDFYPFLKDNREKIEKILTFRIPYYVGPLARGNSRFAWMTRKSEETITPWNFEEVVDKGASAQSFIERMTNFDKNLPNEKVLPKHSLLYEYFTVYNELTKVKYVTEGMRKPAFLSGEQKKAIVDLLFKTNRKVTVKQLKEDYFKKIECFDSVEISGVEDRFNASLGTYHDLLKIIKDKDFLDNEENEDILEDIVLTLTLFEDREMIEERLKTYAHLFDDKVMKQLKRLRYTGWGRLSRKLINGIRDKQSGKTILDFLKSDGFANRNFMQLIHDDSLTFKEDIQKAQVSGQGDSLHEHIANLAGSPAIKKGILQTVKVVDELVKVMGGHKPENIVIEMARENQTTQKGQKNSRERMKRIEEGIKELGSQILKEHPVENTQLQNEKLYLYYLQNGRDMYVDQELDINRLSDYDVDHIVPQSFLKDDSIDNKVLTRSDKNRGKSDNVPSEEVVKKMKNYWRQLLNAKLITQRKFDNLTKAERGGLSELDKAGFIKRQLVETRQITKHVAQILDSRMNTKYDENDKLIREVKVITLKSKLVSDFRKDFQFYKVREINNYHHAHDAYLNAVVGTALIKKYPKLESEFVYGDYKVYDVRKMIAKSEQEIGKATAKYFFYSNIMNFFKTEITLANGEIRKRPLIETNGETGEIVWDKGRDFATVRKVLSMPQVNIVKKTEVQTGGFSKESILPKGNSDKLIARKKDWDPKKYGGFNSPTVAYSVLVVAKVEKGKSKKLKSVKELLGITIMERSSFEKNPIDFLEAKGYKEVKKDLIIKLPKYSLFELENGRKRMLASAGVLQKGNELALPSKYVNFLYLASHYEKLKGSPEDNEQKQLFVEQHKHYLDEIIEQISEFSKRVILADANLDKVLSAYNKHRDKPIREQAENIIHLFTLTNLGAPAAFKYFDTTINRKQYNTTKEVLDATLIRQSITGLYETRIDLSQLGGD

SEQ ID NO: 437 - protein, 1368 aa, Artificial Sequence
  Synthetic
MDKKYSIGLDIGTNSVGWAVITDEYKVPSKKFKVLGNTDRHSIKKNLIGALLFDSGETAEATRLKRTARRRYTRRKNRICYLQEIFSNEMAKVDDSFFHRLEESFLVEEDKKHERHPIFGNIVDEVAYHEKYPTIYHLRKKLVDSTDKADLRLIYLALAHMIKFRGHFLIEGDLNPDNSDVDKLFIQLVQTYNQLFEENPINASGVDAKAILSARLSKSRRLENLIAQLPGEKKNGLFGNLIALSLGLTPNFKSNFDLAEDAKLQLSKDTYDDDLDNLLAQIGDQYADLFLAAKNLSDAILLSDILRVNTEITKAPLSASMVKRYDEHHQDLTLLKALVRQQLPEKYKEIFFDQSKNGYAGYIDGGASQEEFYKFIKPILEKMDGTEELLVKLNREDLLRKQRTFDNGIIPHQIHLGELHAILRRQGDFYPFLKDNREKIEKILTFRIPYYVGPLARGNSRFAWMTRKSEETITPWNFEEVVDKGASAQSFIERMTNFDKNLPNEKVLPKHSLLYEYFTVYNELTKVKYVTEGMRKPAFLSGEQKKAIVDLLFKTNRKVTVKQLKEDYFKKIECFDSVEISGVEDRFNASLGTYHDLLKIIKDKDFLDNEENEDILEDIVLTLTLFEDREMIEERLKTYAHLFDDKVMKQLKRLRYTGWGRLSRKLINGIRDKQSGKTILDFLKSDGFANRNFMQLIHDDSLTFKEDIQKAQVSGQGDSLHEHIANLAGSPAIKKGILQTVKVVDELVKVMGGHKPENIVIEMARENQTTQKGQKNSRERMKRIEEGIKELGSQILKEHPVENTQLQNEKLYLYYLQNGRDMYVDQELDINRLSDYDVDHIVPQSFLKDDSIDNKVLTRSDKNRGKSDNVPSEEVVKKMKNYWRQLLNAKLITQRKFDNLTKAERGGLSELDKAGFIKRQLVETRQITKHVAQILDSRMNTKYDENDKLIREVKVITLKSKLVSDFRKDFQFYKVREINNYHHAHDAYLNAVVGTALIKKYPKLESEFVYGDYKVYDVRKMIAKSEQEIGKATAKYFFYSNIMNFFKTEITLANGEIRKRPLIETNGETGEIVWDKGRDFATVRKVLSMPQVNIVKKTEVQTGGFSKESILPKGNSDKLIARKKDWDPKKYGGFNSPTVAYSVLVVAKVEKGKSKKLKSVKELLGITIMERSSFEKNPIGFLEAKGYKEVKKDLIIKLPKYSLFELENGRKRMLASASVLHKGNELALPSKYVNFLYLASHYEKLKGSSEDNKQKQLFVEQHKHYLDEIIEQISEFSKRVILADANLDKVLSAYNKHRDKPIREQAENIIHLFTLTNLGASAAFKYFDTTIGRKLYTSTKEVLDATLIHQSITGLYETRIDLSQLGGD

SEQ ID NO: 438 - DNA, 27 bp, Artificial Sequence
  Synthetic
gtgctagcaacctgaaacagacaccat

SEQ ID NO: 439 - protein, 1359 aa, Artificial Sequence
  Synthetic
DKKYSIGLDIGTNSVGWAVITDEYKVPSKKFKVLGNTDRHSIKKNLIGALLFDSGETAEATRLKRTARRRYTRRKNRICYLQEIFSNEMAKVDDSFFHRLEESFLVEEDKKHERHPIFGNIVDEVAYHEKYPTIYHLRKKLVDSTDKADLRLIYLALAHMIKFRGHFLIEGDLNPDNSDVDKLFIQLVQTYNQLFEENPINASGVDAKAILSARLSKSRKLENLIAQLPGEKKNGLFGNLIALSLGLTPNFKSNFDLAEDAKLQLSKDTYDDDLDNLLAQIGDQYADLFLAAKNLSDAILLSDILRVNTEITKAPLSASMIKRYDEHHQDLTLLKALVRQQLPEKYKEIFFDQSKNGYAGYIDGGASQEEFYKFIKPILEKMDGTEELLVKLKREDLLRKQRTFDNGSIPHQIHLGELHAILRRQEDFYPFLKDNREKIEKILTFRIPYYVGPLARGNSRFAWMTRKSEETITPWNFEEVVDKGASAQSFIERMTNFDKNLPNEKVLPKHSLLYEYFTVYNELTKVKYVTEGMRKPAFLSGEQKKAIVDLLFKTNRKVTVKQLKEDYFKKIECFDSVEISGVEDRFNASLGTYHDLLKIIKDKDFLDNEENEDILEDIVLTLTLFEDREMIEERLKTYAHLFDDKVMKQLKRRRYTGWGRLSRKLINGIRDKQSGKTILDFLKSDGFANRNFMQLIHDDSLTFKEDIQKAQVSGQGDSLHEHIANLAGSPAIKKGILQTVKVVDELVKVMGRHKPENIVIEMARENQTTQKGQKNSRERMKRIEEGIKELGSQILKEHPVENTQLQNEKLYLYYLQNGRDMYVDQELDINRLSDYDVDHIVPQSFLKDDSIDNKVLTRSDKNRGKSDNVPSEEVVKKMKNYWRQLLNAKLITQRKFDNLTKAERGGLSELDKAGFIKRQLVETRQITKHVAQILDSRMNTKYDENDKLIREVKVITLKSKLVSDFRKDFQFYKVREINNYHHAHDAYLNAVVGTALIKKYPKLESEFVYGDYKVYDVRKMIAKSEQEIGKATAKYFFYSNIMNFFKTEITLANGEIRKRPLIETNGETGEIVWDKGRDFATVRKVLSMPQVNIVKKTEIQTVGQNGGLFDDNPKSPLEVTPSKLVPLKKELNPKKYGGYQKPTTAYPVLLITDTKQLIPISVMNKKQFEQNPVKFLRDRGYQQVGKNDFIKLPKYTLVDIGDGIKRLWASSKEIHKGNQLVVSKKSQILLYHAHHLDSDLSNDYLQNHNQQFDVLFNEIISFSKKCKLGKEHIQKIENVYSNKKNSASIEELAESFIKLLGFTQLGATSPFNFLGVKLNQKQYKGKKDYILPCTEGTLIRQSITGLYETRVDLSKIGED

SEQ ID NO: 440 - protein, 17 aa, Artificial Sequence
  Synthetic
KRTADGSEFEPKKKRKV

SEQ ID NO: 441 - protein, 60 aa, Artificial Sequence
  Synthetic
SGGSSGGSSGSETPGTSESATPESAGSYPYDVPDYAGSAAPAAKKKKLDGSGSGGSSGGS

SEQ ID NO: 442 - DNA, 27 bp, Artificial Sequence
  Synthetic
aaaaatggtgtctgtttcaggttgcta

SEQ ID NO: 443 - DNA, 29 bp, Artificial Sequence
  Synthetic
gtgcactagcaacctgaaacagacaccat

SEQ ID NO: 444 - DNA, 29 bp, Artificial Sequence
  Synthetic
aaaaatggtgtctgtttcaggttgctagt

SEQ ID NO: 445 - RNA, 21 nt, Artificial Sequence
  Synthetic
uaauuucuacuaaguguagau

SEQ ID NO: 446 - RNA, 20 nt, Artificial Sequence
  Synthetic
uaauuucuacucuuguagau

SEQ ID NO: 447 - DNA, 33 bp, Artificial Sequence
  Synthetic
gtgcgttcactagcaacctgaaacagacaccat

SEQ ID NO: 448 - DNA, 33 bp, Artificial Sequence
  Synthetic
aaaaatggtgtctgtttcaggttgctagtgaac

SEQ ID NO: 449 - DNA, 26 bp, Artificial Sequence
  Synthetic
gtgcgcaacctgaaacagacaccatg

SEQ ID NO: 450 - DNA, 26 bp, Artificial Sequence
  Synthetic
aaaacatggtgtctgtttcaggttgc

SEQ ID NO: 451 - DNA, 28 bp, Artificial Sequence
  Synthetic
gtgctagcaacctgaaacagacaccatg

SEQ ID NO: 452 - DNA, 28 bp, Artificial Sequence
  Synthetic
aaaacatggtgtctgtttcaggttgcta

SEQ ID NO: 453 - DNA, 30 bp, Artificial Sequence
  Synthetic
gtgcactagcaacctgaaacagacaccatg

SEQ ID NO: 454 - DNA, 30 bp, Artificial Sequence
  Synthetic
aaaacatggtgtctgtttcaggttgctagt

SEQ ID NO: 455 - DNA, 34 bp, Artificial Sequence
  Synthetic
gtgcgttcactagcaacctgaaacagacaccatg

SEQ ID NO: 456 - DNA, 34 bp, Artificial Sequence
  Synthetic
aaaacatggtgtctgtttcaggttgctagtgaac

SEQ ID NO: 457 - DNA, 27 bp, Artificial Sequence
  Synthetic
gtgcgcaacctgaaacagacaccatgg

SEQ ID NO: 458 - DNA, 27 bp, Artificial Sequence
  Synthetic
aaaaccatggtgtctgtttcaggttgc

SEQ ID NO: 459 - DNA, 29 bp, Artificial Sequence
  Synthetic
gtgctagcaacctgaaacagacaccatgg

SEQ ID NO: 460 - DNA, 29 bp, Artificial Sequence
  Synthetic
aaaaccatggtgtctgtttcaggttgcta

SEQ ID NO: 461 - DNA, 31 bp, Artificial Sequence
  Synthetic
gtgcactagcaacctgaaacagacaccatgg

SEQ ID NO: 462 - DNA, 31 bp, Artificial Sequence
  Synthetic
aaaaccatggtgtctgtttcaggttgctagt

SEQ ID NO: 463 - protein, 1387 aa, Artificial Sequence
  Synthetic
NIMNFFKTEITLANGEIRKRPLIETNGETGEIVWDKGRDFATVRKVLSMPQVNIVKKTEVQTGGFSKESIRPKRNSDKLIARKKDWDPKKYGGFVSPTVAYSVLVVAKVEKGKSKKLKSVKELLGITIMERSSFEKNPIDFLEAKGYKEVKKDLIIKLPKYSLFELENGRKRMLASARFLQKGNELALPSKYVNFLYLASHYEKLKGSPEDNEQKQLFVEQHKHYLDEIIEQISEFSKRVILADANLDKVLSAYNKHRDKPIREQAENIIHLFTLTNLGAPRAFKYFDTTIDRKVYRSTKEVLDATLIHQSITGLYETRIDLSQLGGDGGSGGSGGSGGSGGSGGSGGDKKYSIGLAIGTNSVGWAVITDEYKVPSKKFKVLGNTDRHSIKKNLIGALLFDSGETAEATRLKRTARRRYTRRKNRICYLQEIFSNEMAKVDDSFFHRLEESFLVEEDKKHERHPIFGNIVDEVAYHEKYPTIYHLRKKLVDSTDKADLRLIYLALAHMIKFRGHFLIEGDLNPDNSDVDKLFIQLVQTYNQLFEENPINASGVDAKAILSARLSKSRRLENLIAQLPGEKKNGLFGNLIALSLGLTPNFKSNFDLAEDAKLQLSKDTYDDDLDNLLAQIGDQYADLFLAAKNLSDAILLSDILRVNTEITKAPLSASMIKRYDEHHQDLTLLKALVRQQLPEKYKEIFFDQSKNGYAGYIDGGASQEEFYKFIKPILEKMDGTEELLVKLNREDLLRKQRTFDNGSIPHQIHLGELHAILRRQEDFYPFLKDNREKIEKILTFRIPYYVGPLARGNSRFAWMTRKSEETITPWNFEEVVDKGASAQSFIERMTNFDKNLPNEKVLPKHSLLYEYFTVYNELTKVKYVTEGMRKPAFLSGEQKKAIVDLLFKTNRKVTVKQLKEDYFKKIECFDSVEISGVEDRFNASLGTYHDLLKIIKDKDFLDNEENEDILEDIVLTLTLFEDREMIEERLKTYAHLFDDKVMKQLKRRRYTGWGRLSRKLINGIRDKQSGKTILDFLKSDGFANRNFMQLIHDDSLTFKEDIQKAQVSGQGDSLHEHIANLAGSPAIKKGILQTVKVVDELVKVMGRHKPENIVIEMARENQTTQKGQKNSRERMKRIEEGIKELGSQILKEHPVENTQLQNEKLYLYYLQNGRDMYVDQELDINRLSDYDVDHIVPQSFLKDDSIDNKVLTRSDKNRGKSDNVPSEEVVKKMKNYWRQLLNAKLITQRKFDNLTKAERGGLSELDKAGFIKRQLVETRQITKHVAQILDSRMNTKYDENDKLIREVKVITLKSKLVSDFRKDFQFYKVREINNYHHAHDAYLNAVVGTALIKKYPKLESEFVYGDYKVYDVRKMIAKSEQEIGKATAKYFFYS

SEQ ID NO: 464 - protein, 1387 aa, Artificial Sequence; identical to SEQ ID NO: 463
  Synthetic

SEQ ID NO: 465 - DNA, 35 bp, Artificial Sequence
  Synthetic
gtgcgttcactagcaacctgaaacagacaccatgg

SEQ ID NO: 466 - DNA, 35 bp, Artificial Sequence
  Synthetic
aaaaccatggtgtctgtttcaggttgctagtgaac

SEQ ID NO: 467 - DNA, 38 bp, Artificial Sequence
  Synthetic
gtgctagcaacctgaaacagacaccatggtgcacctga

SEQ ID NO: 468 - DNA, 38 bp, Artificial Sequence
  Synthetic
aaaatcaggtgcaccatggtgtctgtttcaggttgcta

SEQ ID NO: 469 - DNA, 40 bp, Artificial Sequence
  Synthetic
gtgcactagcaacctgaaacagacaccatggtgcacctga

SEQ ID NO: 470 - DNA, 40 bp, Artificial Sequence
  Synthetic
aaaatcaggtgcaccatggtgtctgtttcaggttgctagt

SEQ ID NO: 471 - DNA, 43 bp, Artificial Sequence
  Synthetic
gtgcttcactagcaacctgaaacagacaccatggtgcacctga

SEQ ID NO: 472 - DNA, 43 bp, Artificial Sequence
  Synthetic
aaaatcaggtgcaccatggtgtctgtttcaggttgctagtgaa

SEQ ID NO: 473 - DNA, 35 bp, Artificial Sequence
  Synthetic
gtgcaacctgaaacagacaccatggtgcacctgac

SEQ ID NO: 474 - DNA, 35 bp, Artificial Sequence
  Synthetic
aaaagtcaggtgcaccatggtgtctgtttcaggtt

SEQ ID NO: 475 - DNA, 38 bp, Artificial Sequence
  Synthetic
gtgcagcaacctgaaacagacaccatggtgcacctgac

SEQ ID NO: 476 - DNA, 38 bp, Artificial Sequence
  Synthetic
aaaagtcaggtgcaccatggtgtctgtttcaggttgct

SEQ ID NO: 477 - DNA, 39 bp, Artificial Sequence
  Synthetic
gtgctagcaacctgaaacagacaccatggtgcacctgac

SEQ ID NO: 478 - DNA, 39 bp, Artificial Sequence
  Synthetic
aaaagtcaggtgcaccatggtgtctgtttcaggttgcta

SEQ ID NO: 479 - DNA, 41 bp, Artificial Sequence
  Synthetic
gtgcactagcaacctgaaacagacaccatggtgcacctgac

SEQ ID NO: 480 - DNA, 41 bp, Artificial Sequence
  Synthetic
aaaagtcaggtgcaccatggtgtctgtttcaggttgctagt

SEQ ID NO: 481 - DNA, 44 bp, Artificial Sequence
  Synthetic
gtgcttcactagcaacctgaaacagacaccatggtgcacctgac

SEQ ID NO: 482 - DNA, 44 bp, Artificial Sequence
  Synthetic
aaaagtcaggtgcaccatggtgtctgtttcaggttgctagtgaa

SEQ ID NO: 483 - DNA, 39 bp, Artificial Sequence
  Synthetic
gtgcagcaacctgaaacagacaccatggtgcacctgact

SEQ ID NO: 484 - DNA, 39 bp, Artificial Sequence
  Synthetic
aaaaagtcaggtgcaccatggtgtctgtttcaggttgct

SEQ ID NO: 485 - DNA, 42 bp, Artificial Sequence
  Synthetic
gtgcactagcaacctgaaacagacaccatggtgcacctgact

SEQ ID NO: 486 - DNA, 42 bp, Artificial Sequence
  Synthetic
aaaaagtcaggtgcaccatggtgtctgtttcaggttgctagt

SEQ ID NO: 487 - DNA, 40 bp, Artificial Sequence
  Synthetic
gtgcagcaacctgaaacagacaccatggtgcacctgactc

SEQ ID NO: 488 - DNA, 40 bp, Artificial Sequence
  Synthetic
aaaagagtcaggtgcaccatggtgtctgtttcaggttgct

SEQ ID NO: 489 - DNA, 41 bp, Artificial Sequence
  Synthetic
gtgctagcaacctgaaacagacaccatggtgcacctgactc

SEQ ID NO: 490 - DNA, 41 bp, Artificial Sequence
  Synthetic
aaaagagtcaggtgcaccatggtgtctgtttcaggttgcta

SEQ ID NO: 491 - DNA, 43 bp, Artificial Sequence
  Synthetic
gtgcactagcaacctgaaacagacaccatggtgcacctgactc

SEQ ID NO: 492 - DNA, 43 bp, Artificial Sequence
  Synthetic
aaaagagtcaggtgcaccatggtgtctgtttcaggttgctagt

SEQ ID NO: 493 - DNA, 46 bp, Artificial Sequence
  Synthetic
gtgcttcactagcaacctgaaacagacaccatggtgcacctgactc

SEQ ID NO: 494 - DNA, 46 bp, Artificial Sequence
  Synthetic
aaaagagtcaggtgcaccatggtgtctgtttcaggttgctagtgaa

SEQ ID NO: 495 - DNA, 38 bp, Artificial Sequence
  Synthetic
gtgcaacctgaaacagacaccatggtgcacctgactcc

SEQ ID NO: 496 - DNA, 38 bp, Artificial Sequence
  Synthetic
aaaaggagtcaggtgcaccatggtgtctgtttcaggtt

SEQ ID NO: 497 - DNA, 41 bp, Artificial Sequence
  Synthetic
gtgcagcaacctgaaacagacaccatggtgcacctgactcc

SEQ ID NO: 498 - DNA, 41 bp, Artificial Sequence
  Synthetic
aaaaggagtcaggtgcaccatggtgtctgtttcaggttgct

SEQ ID NO: 499 - DNA, 42 bp, Artificial Sequence
  Synthetic
gtgctagcaacctgaaacagacaccatggtgcacctgactcc

SEQ ID NO: 500 - DNA, 42 bp, Artificial Sequence
  Synthetic
aaaaggagtcaggtgcaccatggtgtctgtttcaggttgcta

SEQ ID NO: 501 - DNA, 44 bp, Artificial Sequence
  Synthetic
gtgcactagcaacctgaaacagacaccatggtgcacctgactcc

SEQ ID NO: 502 - DNA, 44 bp, Artificial Sequence
  Synthetic
aaaaggagtcaggtgcaccatggtgtctgtttcaggttgctagt

SEQ ID NO: 503 - DNA, 47 bp, Artificial Sequence
  Synthetic
gtgcttcactagcaacctgaaacagacaccatggtgcacctgactcc

SEQ ID NO: 504 - DNA, 47 bp, Artificial Sequence
  Synthetic
aaaaggagtcaggtgcaccatggtgtctgtttcaggttgctagtgaa

SEQ ID NO: 505 - DNA, 20 bp, Artificial Sequence
  Synthetic
gaacacaaagcatagactgc

SEQ ID NO: 506 - DNA, 20 bp, Artificial Sequence
  Synthetic
ggcccagactgagcacgtga

SEQ ID NO: 507 - DNA, 20 bp, Artificial Sequence
  Synthetic
ggcactgcggctggaggtgg

SEQ ID NO: 508 - DNA, 20 bp, Artificial Sequence
  Synthetic
gtcatcttagtcattacctg

SEQ ID NO: 509 - DNA, 20 bp, Artificial Sequence
  Synthetic
gagtccgagcagaagaagaa

SEQ ID NO: 510 - DNA, 20 bp, Artificial Sequence
  Synthetic
ggaatcccttctgcagcacc

SEQ ID NO: 511 - DNA, 20 bp, Artificial Sequence
  Synthetic
gcaacctcaaacagacacca

SEQ ID NO: 512 - DNA, 21 bp, Artificial Sequence
  Synthetic
gcctccagccgcagtgccacc

SEQ ID NO: 513 - DNA, 20 bp, Artificial Sequence
  Synthetic
gcacttgtttgcagctattc

SEQ ID NO: 514 - DNA, 20 bp, Artificial Sequence
  Synthetic
gagctaactgtgacagcatg

SEQ ID NO: 515 - DNA, 21 bp, Artificial Sequence
  Synthetic
gtgcttctccagccctggcct

SEQ ID NO: 516 - DNA, 21 bp, Artificial Sequence
  Synthetic
gcgtgctcagtctgggcccca

SEQ ID NO: 517 - DNA, 21 bp, Artificial Sequence
  Synthetic
gagcacgtgatggcagaggaa

SEQ ID NO: 518 - DNA, 20 bp, Artificial Sequence
  Synthetic
gcacatactagcccctgtct

SEQ ID NO: 519 - DNA, 21 bp, Artificial Sequence
  Synthetic
gcccttcaagatggctgacaa

SEQ ID NO: 520 - DNA, 20 bp, Artificial Sequence
  Synthetic
gccatcttgaagggagggga

SEQ ID NO: 521 - DNA, 21 bp, Artificial Sequence
  Synthetic
gcggctctgatgctgactttg

SEQ ID NO: 522 - DNA, 20 bp, Artificial Sequence
  Synthetic
gctaggatctagaagagtca

SEQ ID NO: 523 - DNA, 20 bp, Artificial Sequence
  Synthetic
gtgccatctgcgggacggga

SEQ ID NO: 524 - DNA, 20 bp, Artificial Sequence
  Synthetic
gtccactctaccgggaacag

SEQ ID NO: 525 - DNA, 24 bp, Artificial Sequence
  Synthetic
caccgaacacaaagcatagactgc

SEQ ID NO: 526 - DNA, 24 bp, Artificial Sequence
  Synthetic
caccggcccagactgagcacgtga

SEQ ID NO: 527 - DNA, 24 bp, Artificial Sequence
  Synthetic
caccggcactgcggctggaggtgg

SEQ ID NO: 528 - DNA, 24 bp, Artificial Sequence
  Synthetic
caccgtcatcttagtcattacctg

SEQ ID NO: 529 - DNA, 24 bp, Artificial Sequence
  Synthetic
caccgagtccgagcagaagaagaa

SEQ ID NO: 530 - DNA, 24 bp, Artificial Sequence
  Synthetic
caccggaatcccttctgcagcacc

SEQ ID NO: 531 - DNA, 24 bp, Artificial Sequence
  Synthetic
caccgcaacctcaaacagacacca

SEQ ID NO: 532 - DNA, 25 bp, Artificial Sequence
  Synthetic
caccgcctccagccgcagtgccacc

SEQ ID NO: 533 - DNA, 24 bp, Artificial Sequence
  Synthetic
caccgcacttgtttgcagctattc

SEQ ID NO: 534 - DNA, 24 bp, Artificial Sequence
  Synthetic
caccgagctaactgtgacagcatg

SEQ ID NO: 535 - DNA, 25 bp, Artificial Sequence
  Synthetic
caccgtgcttctccagccctggcct

SEQ ID NO: 536 - DNA, 25 bp, Artificial Sequence
  Synthetic
caccgcgtgctcagtctgggcccca

SEQ ID NO: 537 - DNA, 25 bp, Artificial Sequence
  Synthetic
caccgagcacgtgatggcagaggaa

SEQ ID NO: 538 - DNA, 24 bp, Artificial Sequence
  Synthetic
caccgcacatactagcccctgtct

SEQ ID NO: 539 - DNA, 25 bp, Artificial Sequence
  Synthetic
caccgcccttcaagatggctgacaa

SEQ ID NO: 540 - DNA, 24 bp, Artificial Sequence
  Synthetic
caccgccatcttgaagggagggga

SEQ ID NO: 541 - DNA, 25 bp, Artificial Sequence
  Synthetic
caccgcggctctgatgctgactttg

SEQ ID NO: 542 - DNA, 24 bp, Artificial Sequence
  Synthetic
caccgctaggatctagaagagtca

SEQ ID NO: 543 - DNA, 24 bp, Artificial Sequence
  Synthetic
caccgtgccatctgcgggacggga

SEQ ID NO: 544 - DNA, 24 bp, Artificial Sequence
  Synthetic
caccgtccactctaccgggaacag

SEQ ID NO: 545 - DNA, 24 bp, Artificial Sequence
  Synthetic
aaacgcagtctatgctttgtgttc

SEQ ID NO: 546 - DNA, 24 bp, Artificial Sequence
  Synthetic
aaactcacgtgctcagtctgggcc

SEQ ID NO: 547 - DNA, 24 bp, Artificial Sequence
  Synthetic
aaacccacctccagccgcagtgcc

SEQ ID NO: 548 - DNA, 24 bp, Artificial Sequence
  Synthetic
aaaccaggtaatgactaagatgac

SEQ ID NO: 549 - DNA, 24 bp, Artificial Sequence
  Synthetic
aaacttcttcttctgctcggactc

SEQ ID NO: 550 - DNA, 24 bp, Artificial Sequence
  Synthetic
aaacggtgctgcagaagggattcc

SEQ ID NO: 551 - DNA, 24 bp, Artificial Sequence
  Synthetic
aaactggtgtctgtttgaggttgc

SEQ ID NO: 552 - DNA, 25 bp, Artificial Sequence
  Synthetic
aaacggtggcactgcggctggaggc

SEQ ID NO: 553 - DNA, 24 bp, Artificial Sequence
  Synthetic
aaacgaatagctgcaaacaagtgc

SEQ ID NO: 554 - DNA, 24 bp, Artificial Sequence
  Synthetic
aaaccatgctgtcacagttagctc

SEQ ID NO: 555 - DNA, 25 bp, Artificial Sequence
  Synthetic
aaacaggccagggctggagaagcac

SEQ ID NO: 556 - DNA, 25 bp, Artificial Sequence
  Synthetic
aaactggggcccagactgagcacgc

SEQ ID NO: 557 - DNA, 25 bp, Artificial Sequence
  Synthetic
aaacttcctctgccatcacgtgctc

SEQ ID NO: 558 - DNA, 24 bp, Artificial Sequence
  Synthetic
aaacagacaggggctagtatgtgc

SEQ ID NO: 559 - DNA, 25 bp, Artificial Sequence
  Synthetic
aaacttgtcagccatcttgaagggc

SEQ ID NO: 560 - DNA, 24 bp, Artificial Sequence
  Synthetic
aaactcccctcccttcaagatggc

SEQ ID NO: 561 - DNA, 25 bp, Artificial Sequence
  Synthetic
aaaccaaagtcagcatcagagccgc

SEQ ID NO: 562 - DNA, 24 bp, Artificial Sequence
  Synthetic
aaactgactcttctagatcctagc

SEQ ID NO: 563 - DNA, 24 bp, Artificial Sequence
  Synthetic
aaactcccgtcccgcagatggcac

SEQ ID NO: 564 - DNA, 24 bp, Artificial Sequence
  Synthetic
aaacctgttcccggtagagtggac

SEQ ID NO: 565 - DNA, 57 bp, Artificial Sequence
  Synthetic
  misc_feature (34)..(37): n is a, c, g, or t
acactctttccctacacgacgctcttccgatctnnnnccagccccatctgtcaaact

SEQ ID NO: 566 - DNA, 57 bp, Artificial Sequence
  Synthetic
  misc_feature (34)..(37): n is a, c, g, or t
acactctttccctacacgacgctcttccgatctnnnnatgtgggctgcctagaaagg

SEQ ID NO: 567 - DNA, 57 bp, Artificial Sequence
  Synthetic
  misc_feature (34)..(37): n is a, c, g, or t
acactctttccctacacgacgctcttccgatctnnnngaacccaggtagccagagac

SEQ ID NO: 568 - DNA, 57 bp, Artificial Sequence
  Synthetic
  misc_feature (34)..(37): n is a, c, g, or t
acactctttccctacacgacgctcttccgatctnnnnacgtctcatatgccccttgg

SEQ ID NO: 569 - DNA, 57 bp, Artificial Sequence
  Synthetic
  misc_feature (34)..(37): n is a, c, g, or t
acactctttccctacacgacgctcttccgatctnnnncagctcagcctgagtgttga

SEQ ID NO: 570 - DNA, 57 bp, Artificial Sequence
  Synthetic
  misc_feature (34)..(37): n is a, c, g, or t
acactctttccctacacgacgctcttccgatctnnnncattgcagagaggcgtatca

SEQ ID NO: 571 - DNA, 58 bp, Artificial Sequence
  Synthetic
  misc_feature (34)..(37): n is a, c, g, or t
acactctttccctacacgacgctcttccgatctnnnnagggttggccaatctactccc

SEQ ID NO: 572 - DNA, 57 bp, Artificial Sequence; identical to SEQ ID NO: 567
  Synthetic
  misc_feature (34)..(37): n is a, c, g, or t

SEQ ID NO: 573 - DNA, 57 bp, Artificial Sequence; identical to SEQ ID NO: 565
  Synthetic
  misc_feature (34)..(37): n is a, c, g, or t

SEQ ID NO: 574 - DNA, 57 bp, Artificial Sequence; identical to SEQ ID NO: 565
  Synthetic
  misc_feature (34)..(37): n is a, c, g, or t

SEQ ID NO: 575 - DNA, 57 bp, Artificial Sequence; identical to SEQ ID NO: 566
  Synthetic
  misc_feature (34)..(37): n is a, c, g, or t

SEQ ID NO: 576 - DNA, 57 bp, Artificial Sequence; identical to SEQ ID NO: 566
  Synthetic
  misc_feature (34)..(37): n is a, c, g, or t

SEQ ID NO: 577 - DNA, 57 bp, Artificial Sequence; identical to SEQ ID NO: 566
  Synthetic
  misc_feature (34)..(37): n is a, c, g, or t

SEQ ID NO: 578 - DNA, 57 bp, Artificial Sequence; identical to SEQ ID NO: 566
  Synthetic
  misc_feature (34)..(37): n is a, c, g, or t

SEQ ID NO: 579 - DNA, 57 bp, Artificial Sequence; identical to SEQ ID NO: 567
  Synthetic
  misc_feature (34)..(37): n is a, c, g, or t

SEQ ID NO: 580 - DNA, 57 bp, Artificial Sequence; identical to SEQ ID NO: 567
  Synthetic
  misc_feature (34)..(37): n is a, c, g, or t

SEQ ID NO: 581 - DNA, 58 bp, Artificial Sequence
  Synthetic
  misc_feature (34)..(37): n is a, c, g, or t
acactctttccctacacgacgctcttccgatctnnnnctctgtccagcaccatgagca

SEQ ID NO: 582 - DNA, 57 bp, Artificial Sequence
  Synthetic
  misc_feature (34)..(37): n is a, c, g, or t
acactctttccctacacgacgctcttccgatctnnnnggtccatacccaaggcatcc

SEQ ID NO: 583 - DNA, 57 bp, Artificial Sequence
  Synthetic
  misc_feature (34)..(37): n is a, c, g, or t
acactctttccctacacgacgctcttccgatctnnnngtgtgtacaggggcacattg

SEQ ID NO: 584 - DNA, 53 bp, Artificial Sequence
  Synthetic
  misc_feature (34)..(37): n is a, c, g, or t
acactctttccctacacgacgctcttccgatctnnnngtcctcgggcagctcc

SEQ ID NO: 585 - DNA, 54 bp, Artificial Sequence
  Synthetic
tggagttcagacgtgtgctcttccgatcttgaatggattccttggaaacaatga

SEQ ID NO: 586 - DNA, 49 bp, Artificial Sequence
  Synthetic
tggagttcagacgtgtgctcttccgatctcccagccaaacttgtcaacc

SEQ ID NO: 587 - DNA, 49 bp, Artificial Sequence
  Synthetic
tggagttcagacgtgtgctcttccgatcttcctttcaacccgaacggag

SEQ ID NO: 588 - DNA, 51 bp, Artificial Sequence
  Synthetic
tggagttcagacgtgtgctcttccgatctacgtaggaattttggtgggaca

SEQ ID NO: 589 - DNA, 48 bp, Artificial Sequence
  Synthetic
tggagttcagacgtgtgctcttccgatctctcgtgggtttgtggttgc

SEQ ID NO: 590 - DNA, 47 bp, Artificial Sequence
  Synthetic
tggagttcagacgtgtgctcttccgatctggggtcccaggtgctgac

SEQ ID NO: 591 - DNA, 51 bp, Artificial Sequence
  Synthetic
tggagttcagacgtgtgctcttccgatctgtcttctctgtctccacatgcc

SEQ ID NO: 592 - DNA, 49 bp, Artificial Sequence; identical to SEQ ID NO: 587
  Synthetic

SEQ ID NO: 593 - DNA, 54 bp, Artificial Sequence; identical to SEQ ID NO: 585
  Synthetic

SEQ ID NO: 594 - DNA, 54 bp, Artificial Sequence; identical to SEQ ID NO: 585
  Synthetic

SEQ ID NO: 595 - DNA, 49 bp, Artificial Sequence; identical to SEQ ID NO: 586
  Synthetic

SEQ ID NO: 596 - DNA, 49 bp, Artificial Sequence; identical to SEQ ID NO: 586
  Synthetic

SEQ ID NO: 597 - DNA, 49 bp, Artificial Sequence; identical to SEQ ID NO: 586
  Synthetic

SEQ ID NO: 598 - DNA, 49 bp, Artificial Sequence; identical to SEQ ID NO: 586
  Synthetic

SEQ ID NO: 599 - DNA, 49 bp, Artificial Sequence; identical to SEQ ID NO: 587
  Synthetic

SEQ ID NO: 600 - DNA, 49 bp, Artificial Sequence; identical to SEQ ID NO: 587
  Synthetic

SEQ ID NO: 601 - DNA, 53 bp, Artificial Sequence
  Synthetic
  misc_feature (30)..(33): n is a, c, g, or t
tggagttcagacgtgtgctcttccgatctnnnngtttgtgaccgaggacctga

SEQ ID NO: 602 - DNA, 53 bp, Artificial Sequence
  Synthetic
  misc_feature (30)..(33): n is a, c, g, or t
tggagttcagacgtgtgctcttccgatctnnnntggatgccctaacctcagtg

SEQ ID NO: 603 - DNA, 54 bp, Artificial Sequence
  Synthetic
  misc_feature (30)..(33): n is a, c, g, or t
tggagttcagacgtgtgctcttccgatctnnnnttaggtctgtccacacatcgc

SEQ ID NO: 604 - DNA, 50 bp, Artificial Sequence
  Synthetic
  misc_feature (30)..(33): n is a, c, g, or t
tggagttcagacgtgtgctcttccgatctnnnngcctggtccaggaggag

SEQ ID NO: 605 - DNA, 200 bp, Artificial Sequence
  Synthetic
tgaatggattccttggaaacaatgataacaagacctggctgagctaactgtgacagcatgtggtaattttccagcccgctggccctgtaaaggaaactggaacacaaagcatagactgcggggcgggccagcctgaatagctgcaaacaagtgcagaatatctgatgatgtcatacgcacagtttgacagatggggctgg

SEQ ID NO: 606 - DNA, 297 bp, Artificial Sequence
  Synthetic
atgtgggctgcctagaaaggcatggatgagagaagcctggagacagggatcccagggaaacgcccatgcaattagtctatttctgctgcaagtaagcatgcatttgtaggcttgatgctttttttctgcttctccagccctggcctgggtcaatccttggggcccagactgagcacgtgatggcagaggaaaggaagccctgcttcctccagagggcgtcgcaggacagcttttcctagacaggggctagtatgtgcagctcctgcaccgggatactggttgacaagtttggctggg

SEQ ID NO: 607 - DNA, 288 bp, Artificial Sequence
  Synthetic
gaacccaggtagccagagacccgctggtcttctttcccctcccctgccctcccctcccttcaagatggctgacaaaggccgggctgggtggaaggaagggaggaagggcgaggcagagggtccaaagcaggatgacaggcaggggcaccgcggcgccccggtggcactgcggctggaggtgggggttaaagcggagactctggtgctgtgtgactacagtgggggccctgccctctctgagcccccgcctccaggcctgtgtgtgtgtctccgttcgggttgaaagga

SEQ ID NO: 608 - DNA, 218 bp, Artificial Sequence
  Synthetic
acgtctcatatgccccttggcagtcatcttagtcattacctgaggtgttcgttgtaactcatataaactgagttcccatgttttgcttaatggttgagttccgtttgtctgcacagcctgagacattgctggaaataaagaagagagaaaaacaattttagtatttggaagggaagtgctatggtctgaatgtatgtgtcccaccaaaattcctacgt

SEQ ID NO: 609 - DNA, 277 bp, Artificial Sequence
  Synthetic
cagctcagcctgagtgttgaggccccagtggctgctctgggggcctcctgagtttctcatctgtgcccctccctccctggcccaggtgaaggtgtggttccagaaccggaggacaaagtacaaacggcagaagctggaggaggaagggcctgagtccgagcagaagaagaagggctcccatcacatcaaccggtggcgcattgccacgaagcaggccaatggggaggacatcgatgtcacctccaatgactagggtgggcaaccacaaacccacgag

SEQ ID NO: 610 - DNA, 182 bp, Artificial Sequence
  Synthetic
ggggtcccaggtgctgacgtaggtagtgcttgagaccgccagaagctcggaaaagcgatccaggtgctgcagaagggattccatgaggtgcgcgaaggccctacttccgctttcaccttggagacggcgactctctgcgtactgattggaacatccgcgaaatgatacgcctctctgcaatg

SEQ ID NO: 611 - DNA, 296 bp, Artificial Sequence
  Synthetic
agggttggccaatctactcccaggagcagggagggcaggagccagggctgggcataaaagtcagggcagagccatctattgcttacatttgcttctgacacaactgtgttcactagcaacctcaaacagacaccatggtgcatctgactcctgaggagaagtctgccgttactgccctgtggggcaaggtgaacgtggatgaagttggtggtgaggccctgggcaggttggtatcaaggttacaagacaggtttaaggagaccaatagaaactgggcatgtggagacagagaagac

SEQ ID NO: 612 - DNA, 288 bp, Artificial Sequence; identical to SEQ ID NO: 607
  Synthetic

SEQ ID NO: 613 - DNA, 200 bp, Artificial Sequence; identical to SEQ ID NO: 605
  Synthetic

SEQ ID NO: 614 - DNA, 200 bp, Artificial Sequence; identical to SEQ ID NO: 605
  Synthetic

SEQ ID NO: 615 - DNA, 297 bp, Artificial Sequence; identical to SEQ ID NO: 606
  Synthetic

SEQ ID NO: 616 - DNA, 297 bp, Artificial Sequence; identical to SEQ ID NO: 606
  Synthetic

SEQ ID NO: 617 - DNA, 297 bp, Artificial Sequence; identical to SEQ ID NO: 606
  Synthetic

SEQ ID NO: 618 - DNA, 297 bp, Artificial Sequence; identical to SEQ ID NO: 606
  Synthetic

SEQ ID NO: 619 - DNA, 288 bp, Artificial Sequence; identical to SEQ ID NO: 607
  Synthetic

SEQ ID NO: 620 - DNA, 288 bp, Artificial Sequence; identical to SEQ ID NO: 607
  Synthetic

SEQ ID NO: 621 - DNA, 150 bp, Artificial Sequence
  Synthetic
ctctgtccagcaccatgagcaccggcagcaggcaggaccaccgagcgggaggcccctcctcactcccccaggctcccggctgggcaggggcctcaccacacggctctgatgctgactttgaggcccggggtcaggtcctcggtcacaaac

SEQ ID NO: 622 - DNA, 158 bp, Artificial Sequence
  Synthetic
ggtccatacccaaggcatcctggccatatccaccagagtgaaaagaacgatagctaggatctagaagagtcagggtgtcaacaaaataggcaagaaggaaggcaaaagagagaggagagaagcagacatagacgttaacactgaggttagggcatcca

SEQ ID NO: 623 - DNA, 194 bp, Artificial Sequence
  Synthetic
gtgtgtacaggggcacattgagcgcgtagtgccggaactgcgctgggtcctgcagcagccccgagcagaagtacagtgccatctgcgggacgggatgggtcagagcctgacaagcccagagctgcccagccaggcctggaaggctggcaccacccacagcctcaccgtcggcagcgatgtgtggacagacctaa

SEQ ID NO: 624 - DNA, 162 bp, Artificial Sequence
  Synthetic
gtcctcgggcagctccgcctcggccgggcccttggtgcggtccttgtccgtgatcgctgggccccgccccacgatctggtccactctaccgggaacagagaccccaaagcatgagttcgggtgggtgcagcagggcccctgccctctcctcctggaccaggc

SEQ ID NO: 625 - DNA, 21 bp, Artificial Sequence
  Synthetic
gtgtggagagtgagtaagcca

SEQ ID NO: 626 - DNA, 21 bp, Artificial Sequence
  Synthetic
cacaaagcagtgtagctcagg

SEQ ID NO: 627 - DNA, 20 bp, Artificial Sequence
  Synthetic
tcccctgttgacctggagaa

SEQ ID NO: 628 - DNA, 20 bp, Artificial Sequence
  Synthetic
ttggtgttgacagggagcaa

SEQ ID NO: 629 - DNA, 20 bp, Artificial Sequence
  Synthetic
tgagagggaacagaagggct

SEQ ID NO: 630 - DNA, 21 bp, Artificial Sequence
  Synthetic
tcctagcactttggaaggtcg

SEQ ID NO: 631 - DNA, 20 bp, Artificial Sequence
  Synthetic
ggcatggcttctgagactca

SEQ ID NO: 632 - DNA, 20 bp, Artificial Sequence
  Synthetic
gaagaggctgcccatgagag

SEQ ID NO: 633 - DNA, 20 bp, Artificial Sequence
  Synthetic
ggtctgaggctcgaatcctg

SEQ ID NO: 634 - DNA, 20 bp, Artificial Sequence
  Synthetic
tttccaccagaactcagccc

SEQ ID NO: 635 - DNA, 22 bp, Artificial Sequence
  Synthetic
gcgggcagtggcgtcttagtcg

SEQ ID NO: 636 - DNA, 21 bp, Artificial Sequence
  Synthetic
ctccttgccgcccagccggtc

SEQ ID NO: 637 - DNA, 23 bp, Artificial Sequence
  Synthetic
ccagtgtttcccatccccaacac

SEQ ID NO: 638 - DNA, 22 bp, Artificial Sequence
  Synthetic
caggcccacaggtccttctgga

SEQ ID NO: 639 - DNA, 21 bp, Artificial Sequence
  Synthetic
acggtaggatgatttcaggca

SEQ ID NO: 640 - DNA, 25 bp, Artificial Sequence
  Synthetic
tttttggtactcgagtgttattcag

SEQ ID NO: 641 - DNA, 20 bp, Artificial Sequence
  Synthetic
cactgtacttgccctgacca

SEQ ID NO: 642 - DNA, 20 bp, Artificial Sequence
  Synthetic
ctgagatgtgggcagaaggg

SEQ ID NO: 643 - DNA, 20 bp, Artificial Sequence
  Synthetic
gtccaaaggcccaagaacct

SEQ ID NO: 644 - DNA, 22 bp, Artificial Sequence
  Synthetic
gctcatcttaatctgctcagcc

SEQ ID NO: 645 - DNA, 24 bp, Artificial Sequence
  Synthetic
tgtccccttgcactccctgtcttt

SEQ ID NO: 646 - DNA, 20 bp, Artificial Sequence
  Synthetic
tttggcaatggaggcattgg

SEQ ID NO: 647 - DNA, 20 bp, Artificial Sequence
  Synthetic
ctgtggcctccatatccctg

SEQ ID NO: 648 - DNA, 20 bp, Artificial Sequence
  Synthetic
cctcggttcctccacaacac

SEQ ID NO: 649 - DNA, 22 bp, Artificial Sequence
  Synthetic
ccctgggtttggttggctgctc

SEQ ID NO: 650 - DNA, 23 bp, Artificial Sequence
  Synthetic
cactggggaagaggcgaggacac

SEQ ID NO: 651 - DNA, 23 bp, Artificial Sequence
  Synthetic
gaatggatccccccctagagctc

SEQ ID NO: 652 - DNA, 21 bp, Artificial Sequence
  Synthetic
ccacacggaaggctgaccacg

SEQ ID NO: 653 - DNA, 58 bp, Artificial Sequence
  Synthetic
  misc_feature (34)..(37): n is a, c, g, or t
acactctttccctacacgacgctcttccgatctnnnngtgtggagagtgagtaagcca

SEQ ID NO: 654 - DNA, 58 bp, Artificial Sequence
  Synthetic
  misc_feature (34)..(37): n is a, c, g, or t
acactctttccctacacgacgctcttccgatctnnnncacaaagcagtgtagctcagg

SEQ ID NO: 655 - DNA, 57 bp, Artificial Sequence
  Synthetic
  misc_feature (34)..(37): n is a, c, g, or t
acactctttccctacacgacgctcttccgatctnnnntcccctgttgacctggagaa

SEQ ID NO: 656 - DNA, 57 bp, Artificial Sequence
  Synthetic
  misc_feature (34)..(37): n is a, c, g, or t
acactctttccctacacgacgctcttccgatctnnnnttggtgttgacagggagcaa

SEQ ID NO: 657 - DNA, 57 bp, Artificial Sequence
  Synthetic
  misc_feature (34)..(37): n is a, c, g, or t
acactctttccctacacgacgctcttccgatctnnnntgagagggaacagaagggct

SEQ ID NO: 658 - DNA, 58 bp, Artificial Sequence
  Synthetic
  misc_feature (34)..(37): n is a, c, g, or t
acactctttccctacacgacgctcttccgatctnnnntcctagcactttggaaggtcg

SEQ ID NO: 659 - DNA, 57 bp, Artificial Sequence
  Synthetic
  misc_feature (34)..(37): n is a, c, g, or t
acactctttccctacacgacgctcttccgatctnnnnggcatggcttctgagactca

SEQ ID NO: 660 - DNA, 57 bp, Artificial Sequence
  Synthetic
  misc_feature (34)..(37): n is a, c, g, or t
acactctttccctacacgacgctcttccgatctnnnngaagaggctgcccatgagag

SEQ ID NO: 661 - DNA, 57 bp, Artificial Sequence
  Synthetic
  misc_feature (34)..(37): n is a, c, g, or t
acactctttccctacacgacgctcttccgatctnnnnggtctgaggctcgaatcctg

SEQ ID NO: 662 - DNA, 57 bp, Artificial Sequence
  Synthetic
  misc_feature (34)..(37): n is a, c, g, or t
acactctttccctacacgacgctcttccgatctnnnntttccaccagaactcagccc

SEQ ID NO: 663 - DNA, 59 bp, Artificial Sequence
  Synthetic
  misc_feature (34)..(37): n is a, c, g, or t
acactctttccctacacgacgctcttccgatctnnnngcgggcagtggcgtcttagtcg

SEQ ID NO: 664 - DNA, 58 bp, Artificial Sequence
  Synthetic
  misc_feature (34)..(37): n is a, c, g, or t
acactctttccctacacgacgctcttccgatctnnnnctccttgccgcccagccggtc

SEQ ID NO: 665 - DNA, 60 bp, Artificial Sequence
  Synthetic
  misc_feature (34)..(37): n is a, c, g, or t
acactctttccctacacgacgctcttccgatctnnnnccagtgtttcccatccccaacac

SEQ ID NO: 666 - DNA, 59 bp, Artificial Sequence
  Synthetic
  misc_feature (34)..(37): n is a, c, g, or t
acactctttccctacacgacgctcttccgatctnnnncaggcccacaggtccttctgga

SEQ ID NO: 667 - DNA, 50 bp, Artificial Sequence
  Synthetic
tggagttcagacgtgtgctcttccgatctacggtaggatgatttcaggca

SEQ ID NO: 668 - DNA, 54 bp, Artificial Sequence
  Synthetic
tggagttcagacgtgtgctcttccgatcttttttggtactcgagtgttattcag

SEQ ID NO: 669 - DNA, 49 bp, Artificial Sequence
  Synthetic
tggagttcagacgtgtgctcttccgatctcactgtacttgccctgacca

SEQ ID NO: 670 - DNA, 49 bp, Artificial Sequence
  Synthetic
tggagttcagacgtgtgctcttccgatctctgagatgtgggcagaaggg

SEQ ID NO: 671 - DNA, 49 bp, Artificial Sequence
  Synthetic
tggagttcagacgtgtgctcttccgatctgtccaaaggcccaagaacct

SEQ ID NO: 672 - DNA, 51 bp, Artificial Sequence
  Synthetic
tggagttcagacgtgtgctcttccgatctgctcatcttaatctgctcagcc

SEQ ID NO: 673 - DNA, 53 bp, Artificial Sequence
  Synthetic
tggagttcagacgtgtgctcttccgatcttgtccccttgcactccctgtcttt

SEQ ID NO: 674 - DNA, 49 bp, Artificial Sequence
  Synthetic
tggagttcagacgtgtgctcttccgatcttttggcaatggaggcattgg

SEQ ID NO: 675 - DNA, 49 bp, Artificial Sequence
  Synthetic
tggagttcagacgtgtgctcttccgatctctgtggcctccatatccctg

SEQ ID NO: 676 - DNA, 49 bp, Artificial Sequence
  Synthetic
tggagttcagacgtgtgctcttccgatctcctcggttcctccacaacac

SEQ ID NO: 677 - DNA, 51 bp, Artificial Sequence
  Synthetic
tggagttcagacgtgtgctcttccgatctccctgggtttggttggctgctc

SEQ ID NO: 678 - DNA, 52 bp, Artificial Sequence
  Synthetic
tggagttcagacgtgtgctcttccgatctcactggggaagaggcgaggacac

SEQ ID NO: 679 - DNA, 52 bp, Artificial Sequence
  Synthetic
tggagttcagacgtgtgctcttccgatctgaatggatccccccctagagctc

SEQ ID NO: 680 - DNA, 50 bp, Artificial Sequence
  Synthetic
tggagttcagacgtgtgctcttccgatctccacacggaaggctgaccacg

SEQ ID NO: 681 - DNA, 265 bp, Artificial Sequence
  Synthetic
gtgtggagagtgagtaagccagaacacaatgcatagattgccggtaaataggtttagattcatccatttttaaaaaatggtgtgggagcattaaatatgtatatagtagatatggaaaaatgattctcataataactgacatttctgtttcacaagaaaattattttacattatatgtatattttacataaattatacatagtcatttaaaaagctcaaatagtgcaaaaacaatatggagaattgcctgaaatcatcctaccgt

SEQ ID NO: 682 - DNA, 175 bp, Artificial Sequence
  Synthetic
cacaaagcagtgtagctcagggaaggagcagtgagtttgggcacttgtgacagaatagtgggactatgccagagatacacaggaggaggtggtaccttctagctccccctcaaaacataaagcatagactgcaaagtactcccaagcaggctgaataacactcgagtaccaaaaa

SEQ ID NO: 683 - DNA, 175 bp, Artificial Sequence
  Synthetic
tcccctgttgacctggagaagcatgaaccagtcaaaaagtttaaagacaagagcattaactgcaccagtgggcagctcagctcagacaccagtagcgtgggcacccagactgagcacgtgctggagcccaagaaatgcagagacctgtgcacctctggtcagggcaagtacagtg

SEQ ID NO: 684 - DNA, 175 bp, Artificial Sequence
  Synthetic
ttggtgttgacagggagcaacttcacagtcccaggcatcaggacacagactgggcacgtgagggaagcccaagggagaggactggtgtaatcgaggctgactccacttttaatgtttgactgatgataggtttcaagtctcactaagtctccttccccttctgcccacatctcag

SEQ ID NO: 685 - DNA, 175 bp, Artificial Sequence
  Synthetic
tgagagggaacagaagggctaagactaaaaggaacagaggagttcatagtgagcggtaaagagctcagactgagcaagtgaggggctcagcctcccatggaggacagggggctggggcccctggctgatgtctggactgaagcccccacgcccagaggttcttgggcctttggac

SEQ ID NO: 686 - DNA, 175 bp, Artificial Sequence
  Synthetic
tcctagcactttggaaggtcgaagcggcaggatggcttcaacccaggagttcgagaccagactgagcaagagagggagagtgtctgtattaacaacaaacaaacaaacaaaaaactaaactaaaagaaactgtggtgtataatataaaattctggctgagcagattaagatgagc

SEQ ID NO: 687 - DNA, 175 bp, Artificial Sequence
  Synthetic
ggcatggcttctgagactcatagctggggctgaagatccctaggggggctctgctgggctcactgctctccagagtggtccagcccggctgcagggtgctgcttccagcttggtgcactgcggccggaggaggtggaggatggaaagtaagattcaaagacagggagtgcaaggg

SEQ ID NO: 688 - DNA, 175 bp, Artificial Sequence
  Synthetic
gaagaggctgcccatgagagcaagggagccgaagcaagtgctccccaatcctgaaacctgcctggctggggcccctgtcactaacagcaaccccaccccctctagccgcagagccctgcgcacgtgcatgtgccctgaagacaggcttcccctgcccaatgcctccattgccaaa

SEQ ID NO: 689 - DNA, 175 bp, Artificial Sequence
  Synthetic
ggtctgaggctcgaatcctggcagcaggtccttcatggcaaggcgggaaaagagaaaagccaacgggttctcatgctgggaaaagatgccgggcacgacggctggaggtggggggttgggagtgggtgggatgcttgcgtgccctgcatgaggtgcagggatatggaggccacag

SEQ ID NO: 690 - DNA, 175 bp, Artificial Sequence
  Synthetic
tttccaccagaactcagcccaggctgctgtgggatggaatcacctgcacccggatgttctttctgggctggtacatacaggcaaggcatcacggctggaggtggagggggcctaacccggggttgcccaggaaggggtttgcacatggattcggtgtgttgtggaggaaccgagg

SEQ ID NO: 691 - DNA, 252 bp, Artificial Sequence
  Synthetic
gcgggcagtggcgtcttagtcgccttagcactgggtgcttaatccggctccatcttttctccacggagggggcctggtgctgcagacggggttcccggggtcaggacgatccaggtgacttgagagaaaataaggggagttgtattgacaccaactgttttatttattgtgatcttcaggttagtaaacaactccagtggcatcaatctgtgtatctgttaagtcttaatgagcagccaaccaaacccaggg

SEQ ID NO: 692 - DNA, 327 bp, Artificial Sequence
  Synthetic
ctccttgccgcccagccggtccaggcctctggcgaacatggcgcttgtcccctgccaggtgctgcggatggcaatcctgctgtcttactgctctatcctgtgtaactacaaggccatcgaaatgccctcacaccagacctacggagggagctggaaattcctgacgttcattgatctggtaaggccgtcccctccccctgctcgccccgcaccccgtgcctgtgtgtgcgtgtgtgtgtgtgtgtgtgtgtgtgtgtgtggatgcgcgagcacctgcgcacgtgcgcgcctccagcatccacccgtgtcctcgcctcttccccagtg

SEQ ID NO: 693 - DNA, 270 bp, Artificial Sequence
  Synthetic
ccagtgtttcccatccccaacacagtgacagaaggcagccaaggaatcctcattcctgtcctggaactacaggagtccctcctacagcaccaggtgtattcatcttctgttgttgctataacaaaattaccacaaacttagtggcttaagtaactacacatttattattttccagttgtggaggtcagaggtctcaaactggtctcactgggaaaaactcaaggtcttcagggctgtattccctttggagctctagggggggatccattc

SEQ ID NO: 694 - DNA, 279 bp, Artificial Sequence
  Synthetic
caggcccacaggtccttctggaaggactcaggcaggagttaggaggctcccggggtcaggcttctgggtctagatttccagaggcccctctgcagcaccaggcattcgcctctaggagtcatcgctcttcagcggatcctgcagcccttggcgatgctcagagtgaacgcgttaccccgccagcccccctctgccggctcctgccggtttgtgatttctgtgtcttcgtctgtggcctgtggatgtggccttacacctcgtggtcagccttccgtgtgg

SEQ ID NO: 695 - protein, 229 aa, Artificial Sequence [sequence omitted]

SEQ ID NO: 696 - protein, 229 aa, Artificial Sequence
  Synthetic
MSSETGPVAVDPTLRRRIEPHEFEVFFDPRELRKETCLLYEINWGGRHSIWRHTSQNTNKHVEVNFIEKFTTERYFCPNTRCSITWFLSWSPCGECSRAITEFLSRYPHVTLFIYIARLYHHADPENRQGLEDLISSGVTIQIMTEQESGYCWRNFVNYSPSNEAHWPRYPHLWVRLYVLELYCIILGLPPCLNILRRKQPQLTFFTIALQSCHYQRLPPHILWATGLK

SEQ ID NO: 697 - protein, 229 aa, Artificial Sequence
  Synthetic
MSSETGPVAVDPTLRRRIEPHEFEVFFDPRELRKETCLLYEINWGGRHSIWRHTSQNTNKHVEVNFIEKFTTERYFCPNTRCSITWFLSYSPCGECSRAITEFLSRYPHVTLFIYIARLYHHADPENRQGLRDLISSGVTIQIMTEQESGYCWRNFVNYSPSNEAHWPRYPHLWVRLYVLELYCIILGLPPCLNILRRKQPQLTFFTIALQSCHYQRLPPHILWATGLK

SEQ ID NO: 698 - protein, 229 aa, Artificial Sequence
  Synthetic
MSSETGPVAVDPTLRRRIEPHEFEVFFDPRELRKETCLLYEINWGGRHSIWRHTSQNTNKHVEVNFIEKFTTERYFCPNTRCSITWFLSYSPCGECSRAITEFLSRYPHVTLFIYIARLYHHADPRNRQGLEDLISSGVTIQIMTEQESGYCWRNFVNYSPSNEAHWPRYPHLWVRLYVLELYCIILGLPPCLNILRRKQPQLTFFTIALQSCHYQRLPPHILWATGLK

SEQ ID NO: 699 - protein, 229 aa, Artificial Sequence
  Synthetic
MSSETGPVAVDPTLRRRIEPHEFEVFFDPRELRKETCLLYEINWGGRHSIWRHTSQNTNKHVEVNFIEKFTTERYFCPNTRCSITWFLSYSPCGECSRAITEFLSRYPHVTLFIYIARLYHHADPENRQGLEDLISSGVTIQIMTEQESGYCWRNFVNYSPSNEAHWPRYPHLWVRLYVLELYCIILGLPPCLNILRRKQPQLTFFTIALQSCHYQRLPPHILWATGLK

SEQ ID NO: 700 - protein, 222 aa, Artificial Sequence
  Synthetic
MSSETGPVAVDPTLRRRIEPHEFEVFFDPRELRKETCLLYEIKWGTSHKIWRHSSKNTTKHVEVNFIEKFTSERHFCPSTSCSITWFLSWSPCGECSKAITEFLSQHPNVTLVIYVARLYHHMDQQNRQGLRDLVNSGVTIQIMTAPEYDYCWRNFVNYPPGKEAHWPRYPPLWMKLYALELHAGILGLPPCLNILRRKQPQLTFFTIALQSCHYQRLPPHI

SEQ ID NO: 701 - protein, 199 aa, Artificial Sequence
  Synthetic
MEASPASGPRHLMDPHIFTSNFNNGIGRHKTYLCYEVERLDNGTSVKMDQHRGFLHGQAKNLLCGFYGRHAELRFLDLVPSLQLDPAQIYRVTWFISWSPCFSWGCAGEVRAFLQENTHVRLRIFAARIYDYDPLYKEALQMLRDAGAQVSIMTYDEFKHCWDTFVDHQGCPFQPWDGLDEHSQALSGRLRAILQNQGN

SEQ ID NO: 702 - protein, 199 aa, Artificial Sequence
  Synthetic
MEASPASGPRHLMDPHIFTSNFNNGIGRHKAYLCYEVERLDNGTSVKMDQHRGFLHGQAKNLLCGFYGRHAELRFLDLVPSLQLDPAQIYRVTWFISWSPCFSWGCAGEVRAFLQENTHVRLRIFAARIYDYDPLYKEALQMLRDAGAQVSIMTYDEFKHCWDTFVDHQGCPFQPWDGLDEHSQALSGRLRAILQNQGN

SEQ ID NO: 703 - protein, 209 aa, Artificial Sequence; identical to SEQ ID NO: 49
  Synthetic

SEQ ID NO: 704 - protein, 313 aa, Artificial Sequence; identical to SEQ ID NO: 48
  Synthetic

SEQ ID NO: 705 - protein, 270 aa, Artificial Sequence; identical to SEQ ID NO: 53
  Synthetic

SEQ ID NO: 706 - protein, 579 aa, Artificial Sequence
  Synthetic
MGTTGLESLSLGDRGAAPTVTSSERLVPDPPNDLRKEDVAMELERVGEDEEQMMIKRSSECNPLLQEPIASAQFGATAGTECRKSVPCGWERVVKQRLFGKTAGRFDVYFISPQGLKFRSKSSLANYLHKNGETSLKPEDFDFTVLSKRGIKSRYKDCSMAALTSHLQNQSNNSNWNLRTRSKCKKDVFMPPSSSSELQESRGLSNFTSTHLLLKEDEGVDDVNFRKVRKPKGKVTILKGIPIKKTKKGCRKSCSGFVQSDSKRESVCNKADAESEPVAQKSQLDRTVCISDAGACGETLSVTSEENSLVKKKERSLSSGSNFCSEQKTSGIINKFCSAKDSEHNEKYEDTFLESEEIGTKVEVVERKEHLHTDILKRGSEMDNNCSPTRKDFTGEKIFQEDTIPRTQIERRKTSLYFSSKYNKEALSPPRRKAFKKWTPPRSPFNLVQETLFHDPWKLLIATIFLNRTSGKMAIPVLWKFLEKYPSAEVARTADWRDVSELLKPLGLYDLRAKTIVKFSDEYLTKQWKYPIELHGIGKYGNDSYRIFCVNEWKQVHPEDHKLNKYHDWLWENHEKLSL

SEQ ID NO: 707 - protein, 410 aa, Artificial Sequence
  Synthetic
MEAENAGSYSLQQAQAFYTFPFQQLMAEAPNMAVVNEQQMPEEVPAPAPAQEPVQEAPKGRKRKPRTTEPKQPVEPKKPVESKKSGKSAKSKEKQEKITDTFKVKRKVDRFNGVSEAELLTKTLPDILTFNLDIVIIGINPGLMAAYKGHHYPGPGNHFWKCLFMSGLSEVQLNHMDDHTLPGKYGIGFTNMVERTTPGSKDLSSKEFREGGRILVQKLQKYQPRIAVFNGKCIYEIFSKEVFGVKVKNLEFGLQPHKIPDTETLCYVMPSSSARCAQFPRAQDKVHYYIKLKDLRDQLKGIERNMDVQEVQYTFDLQLAQEDAKKMAVKEEKYDPGYEAAYGGAYGENPCSSEPCGFSSNGLIESVELRGESAFSGIPNGQWMTQSFTDQIPSFSNHCGTQEQEEESHA

SEQ ID NO: 708 - protein, 740 aa, Artificial Sequence
  Synthetic
MAAFSEMGVMPEIAQAVEEMDWLLPTDIQAESIPLILGGGDVLMAAETGSGKTGAFSIPVIQIVYETLKDQQEGKKGKTTIKTGASVLNKWQMNPYDRGSAFAIGSDGLCCQSREVKEWHGCRATKGLMKGKHYYEVSCHDQGLCRVGWSTMQASLDLGTDKFGFGFGGTGKKSHNKQFDNYGEEFTMHDTIGCYLDIDKGHVKFSKNGKDLGLAFEIPPHMKNQALFPACVLKNAELKFNFGEEEFKFPPKDGFVALSKAPDGYIVKSQHSGNAQVTQTKFLPNAPKALIVEPSRELAEQTLNNIKQFKKYIDNPKLRELLIIGGVAARDQLSVLENGVDIVVGTPGRLDDLVSTGKLNLSQVRFLVLDEADGLLSQGYSDFINRMHNQIPQVTSDGKRLQVIVCSATLHSFDVKKLSEKIMHFPTWVDLKGEDSVPDTVHHVVVPVNPKTDRLWERLGKSHIRTDDVHAKDNTRPGANSPEMWSEAIKILKGEYAVRAIKEHKMDQAIIFCRTKIDCDNLEQYFIQQGGGPDKKGHQFSCVCLHGDRKPHERKQNLERFKKGDVRFLICTDVAARGIDIHGVPYVINVTLPDEKQNYVHRIGRVGRAERMGLAISLVATEKEKVWYHVCSSRGKGCYNTRLKEDGGCTIWYNEMQLLSEIEEHLNCTISQVEPDIKVPVDEFDGKVTYGQKRAAGGGSYKGHVDILAPTVQELAALEKEAQTSFLHLGYLPNQLFRTF

SEQ ID NO: 709 - protein, 846 aa, Artificial Sequence
  Synthetic
MGIQGLLQFIKEASEPIHVRKYKGQVVAVDTYCWLHKGAIACAEKLAKGEPTDRYVGFCMKFVNMLLSHGIKPILVFDGCTLPSKKEVERSRRERRQANLLKGKQLLREGKVSEARECFTRSINITHAMAHKVIKAARSQGVDCLVAPYEADAQLAYLNKAGIVQAIITEDSDLLAFGCKKVILKMDQFGNGLEIDQARLGMCRQLGDVFTEEKFRYMCILSGCDYLSSLRGIGLAKACKVLRLANNPDIVKVIKKIGHYLKMNITVPEDYINGFIRANNTFLYQLVFDPIKRKLIPLNAYEDDVDPETLSYAGQYVDDSIALQIALGNKDINTFEQIDDYNPDTAMPAHSRSHSWDDKTCQKSANVSSIWHRNYSPRPESGTVSDAPQLKENPSTVGVERVISTKGLNLPRKSSIVKRPRSAELSEDDLLSQYSLSFTKKTKKNSSEGNKSLSFSEVFVPDLVNGPTNKKSVSTPPRTRNKFATFLQRKNEESGAVVVPGTRSRFFCSSDSTDCVSNKVSIQPLDETAVTDKENNLHESEYGDQEGKRLVDTDVARNSSDDIPNNHIPGDHIPDKATVFTDEESYSFESSKFTRTISPPTLGTLRSCFSWSGGLGDFSRTPSPSPSTALQQFRRKSDSPTSLPENNMSDVSQLKSEESSDDESHPLREEACSSQSQESGEFSLQSSNASKLSQCSSKDSDSEESDCNIKLLDSQSDQTSKLRLSHFSKKDTPLRNKVPGLYKSSSADSLSTTKIKPLGPARASGLSKKPASIQKRKHHNAENKPGLQIKLNELWKNFGFKKDSEKLPPCKKPLSPVRDNIQLTPEAEEDIFNKPECGRVQRAIFQ

SEQ ID NO: 710 - protein, 261 aa, Artificial Sequence
  Synthetic
MFEARLVQGSILKKVLEALKDLINEACWDISSSGVNLQSMDSSHVSLVQLTLRSEGFDTYRCDRNLAMGVNLTSMSKILKCAGNEDIITLRAEDNADTLALVFEAPNQEKVSDYEMKLMDLDVEQLGIPEQEYSCVVKMPSGEFARICRDLSHIGDAVVISCAKDGVKFSASGELGNGNIKLSQTSNVDKEEEAVTIEMNEPVQLTFALRYLNFFTKATPLSSTVTLSMSADVPLVVEYKIADMGHLKYYLAPKIEDEEGS

SEQ ID NO: 711 - protein, 1107 aa, Artificial Sequence
  Synthetic
MDGKRRPGPGPGVPPKRARGGLWDDDDAPRPSQFEEDLALMEEMEAEHRLQEQEEEELQSVLEGVADGQVPPSAIDPRWLRPTPPALDPQTEPLIFQQLEIDHYVGPAQPVPGGPPPSRGSVPVLRAFGVTDEGFSVCCHIHGFAPYFYTPAPPGFGPEHMGDLQRELNLAISRDSRGGRELTGPAVLAVELCSRESMFGYHGHGPSPFLRITVALPRLVAPARRLLEQGIRVAGLGTPSFAPYEANVDFEIRFMVDTDIVGCNWLELPAGKYALRLKEKATQCQLEADVLWSDVVSHPPEGPWQRIAPLRVLSFDIECAGRKGIFPEPERDPVIQICSLGLRWGEPEPFLRLALTLRPCAPILGAKVQSYEKEEDLLQAWSTFIRIMDPDVITGYNIQNFDLPYLISRAQTLKVQTFPFLGRVAGLCSNIRDSSFQSKQTGRRDTKVVSMVGRVQMDMLQVLLREYKLRSYTLNAVSFHFLGEQKEDVQHSIITDLQNGNDQTRRRLAVYCLKDAYLPLRLLERLMVLVNAVEMARVTGVPLSYLLSRGQQVKVVSQLLRQAMHEGLLMPVVKSEGGEDYTGATVIEPLKGYYDVPIATLDFSSLYPSIMMAHNLCYTTLLRPGTAQKLGLTEDQFIRTPTGDEFVKTSVRKGLLPQILENLLSARKRAKAELAKETDPLRRQVLDGRQLALKVSANSVYGFTGAQVGKLPCLEISQSVTGFGRQMIEKTKQLVESKYTVENGYSTSAKVVYGDTDSVMCRFGVSSVAEAMALGREAADWVSGHFPSPIRLEFEKVYFPYLLISKKRYAGLLFSSRPDAHDRMDCKGLEAVRRDNCPLVANLVTASLRRLLIDRDPEGAVAHAQDVISDLLCNRIDISQLVITKELTRAASDYAGKQAHVELAERMRKRDPGSAPSLGDRVPYVIISAAKGVAAYMKSEDPLFVLEHSLPIDTQYYLEQQLAKPLLRIFEPILGEGRAEAVLLRGDHTRCKTVLTGKVGGLLAFAKRRNCCIGCRTVLSHQGAVCEFCQPRESELYQKEVSHLNALEERFSRLWTQCQRCQGSLHEDVICTSRDCPIFYMRKKVRKDLEDQEQLLRRFGPPGPEAW

SEQ ID NO: 712 - protein, 469 aa, Artificial Sequence
  Synthetic
MFSEQAAQRAHTLLSPPSANNATFARVPVATYTNSSQPFRLGERSFSRQYAHIYATRLIQMRPFLENRAQQHWGSGVGVKKLCELQPEEKCCVVGTLFKAMPLQPSILREVSEEHNLLPQPPRSKYIHPDDELVLEDELQRIKLKGTIDVSKLVTGTVLAVFGSVRDDGKFLVEDYCFADLAPQKPAPPLDTDRFVLLVSGLGLGGGGGESLLGTQLLVDVVTGQLGDEGEQCSAAHVSRVILAGNLLSHSTQSRDSINKAKYLTKKTQAASVEAVKMLDEILLQLSASVPVDVMPGEFDPTNYTLPQQPLHPCMFPLATAYSTLQLVTNPYQATIDGVRFLGTSGQNVSDIFRYSSMEDHLEILEWTLRVRHISPTAPDTLGCYPFYKTDPFIFPECPHVYFCGNTPSFGSKIIRGPEDQTVLLVTVPDFSATQTACLVNLRSLACQPISFSGFGAEDDDLGGLGLGP

SEQ ID NO: 713 - protein, 466 aa, Artificial Sequence
  Synthetic
MADQLYLENIDEFVTDQNKIVTYKWLSYTLGVHVNQAKQMLYDYVERKRKENSGAQLHVTYLVSGSLIQNGHSCHKVAVVREDKLEAVKSKLAVTASIHVYSIQKAMLKDSGPLFNTDYDILKSNLQNCSKFSAIQCAAAVPRAPAESSSSSKKFEQSHLHMSSETQANNELTTNGHGPPASKQVSQQPKGIMGMFASKAAAKTQETNKETKTEAKEVTNASAAGNKAPGKGNMMSNFFGKAAMNKFKVNLDSEQAVKEEKIVEQPTVSVTEPKLATPAGLKKSSKKAEPVKVLQKEKKRGKRVALSDDETKETENMRKKRRRIKLPESDSSEDEVFPDSPGAYEAESPSPPPPPSPPLEPVPKTEPEPPSVKSSSGENKRKRKRVLKSKTYLDGEGCIVTEKVYESESCTDSEEELNMKTSSVHRPPAMTVKKEPREERKGPKKGTAALGKANRQVSITGFFQRK

SEQ ID NO: 714 - protein, 713 aa, Artificial Sequence; identical to SEQ ID NO: 56
  Synthetic

SEQ ID NO: 715 - protein, 870 aa, Artificial Sequence; identical to SEQ ID NO: 59
  Synthetic

SEQ ID NO: 716 - protein, 495 aa, Artificial Sequence
  Synthetic
MDSLAESRWPPGLAVMKTIDDLLRCGICFEYFNIAMIIPQCSHNYCSLCIRKFLSYKTQCPTCCVTVTEPDLKNNRILDELVKSLNFARNHLLQFALESPAKSPASSSSKNLAVKVYTPVASRQSLKQGSRLMDNFLIREMSGSTSELLIKENKSKFSPQKEASPAAKTKETRSVEEIAPDPSEAKRPEPPSTSTLKQVTKVDCPVCGVNIPESHINKHLDSCLSREEKKESLRSSVHKRKPLPKTVYNLLSDRDLKKKLKEHGLSIQGNKQQLIKRHQEFVHMYNAQCDALHPKSAAEIVREIENIEKTRMRLEASKLNESVMVFTKDQTEKEIDEIHSKYRKKHKSEFQLLVDQARKGYKKIAGMSQKTVTITKEDESTEKLSSVCMGQEDNMTSVTNHFSQSKLDSPEELEPDREEDSSSCIDIQEVLSSSESDSCNSSSSDIIRDLLEEEEAWEASHKNDLQDTEISPRQNRRTRAAESAEIEPRNKRNRN

SEQ ID NO: 717 - protein, 391 aa, Artificial Sequence
  Synthetic
MVEADRPGKLFIGGLNTETNEKALEAVFGKYGRIVEVLLMKDRETNKSRGFAFVTFESPADAKDAARDMNGKSLDGKAIKVEQATKPSFESGRRGPPPPPRSRGPPRGLRGGRGGSGGTRGPPSRGGHMDDGGYSMNFNMSSSRGPLPVKRGPPPRSGGPPPKRSAPSGPVRSSSGMGGRAPVSRGRDSYGGPPRREPLPSRRDVYLSPRDDGYSTKDSYSSRDYPSSRDTRDYAPPPRDYTYRDYGHSSSRDDYPSRGYSDRDGYGRDRDYSDHPSGGSYRDSYESYGNSRSAPPTRGPPPSYGGSSRYDDYSSSRDGYGGSRDSYSSSRSDLYSSGRDRVGRQERGLPPSMERGYPPPRDSYSSSSRGAPRGGGRGGSRSDRGGGRSRY

SEQ ID NO: 718 - protein, 1251 aa, Artificial Sequence; identical to SEQ ID NO: 64
  Synthetic

SEQ ID NO: 719 - protein, 774 aa, Artificial Sequence
  Synthetic
MAHEAMEYDVQVQLNHAEQQPAPAGMASSQGGPALLQPVPADVVSSQGVPSILQPAPAEVISSQATPPLLQPAPQLSVDLTEVEVLGEDTVENINPRTSEQHRQGSDGNHTIPASSLHSMTNFISGLQRLHGMLEFLRPSSSNHSVGPMRTRRRVSASRRARAGGSQRTDSARLRAPLDAYFQVSRTQPDLPATTYDSETRNPVSEELQVSSSSDSDSDSSAEYGGVVDQAEESGAVILEEQLAGVSAEQEVTCIDGGKTLPKQPSPQKSEPLLPSASMDEEEGDTCTICLEQWTNAGDHRLSALRCGHLFGYRCISTWLKGQVRKCPQCNKKARHSDIVVLYARTLRALDTSEQERMKSSLLKEQMLRKQAELESAQCRLQLQVLTDKCTRLQRRVQDLQKLTSHQSQNLQQPRGSQAWVLSCSPSSQGQHKHKYHFQKTFTVSQAGNCRIMAYCDALSCLVISQPSPQASFLPGFGVKMLSTANMKSSQYIPMHGKQIRGLAFSSYLRGLLLSASLDNTIKLTSLETNTVVQTYNAGRPVWSCCWCLDEANYIYAGLANGSILVYDVRNTSSHVQELVAQKARCPLVSLSYMPRAASAAFPYGGVLAGTLEDASFWEQKMDFSHWPHVLPLEPGGCIDFQTENSSRHCLVTYRPDKNHTTIRSVLMEMSYRLDDTGNPICSCQPVHTFFGGPTCKLLTKNAIFQSPENDGNILVCTGDEAANSALLWDAASGSLLQDLQTDQPVLDICPFEVNRNSYLATLTEKMVHIYKWE

SEQ ID NO: 720 - protein, 1208 aa, Artificial Sequence
  Synthetic
MDLHMMNCELLATCSALGYLEGDTYHKEPDCLESVKDLIRYLRHEDETRDVRQQLGAAQILQSDLLPILTQHHQDKPLFDAVIRLMVNLTQPALLCFGNLPKEPSFRHHFLQVLTYLQAYKEAFASEKAFGVLSETLYELLQLGWEERQEEDNLLIERILLLVRNILHVPADLDQEKKIDDDASAHDQLLWAIHLSGLDDLLLFLASSSAEEQWSLHVLEIVSLMFRDQNPEQLAGVGQGRLAQERSADFAELEVLRQREMAEKKTRALQRGNRHSRFGGSYIVQGLKSIGERDLIFHKGLHNLRNYSSDLGKQPKKVPKRRQAARELSIQRRSALNVRLFLRDFCSEFLENCYNRLMGSVKDHLLREKAQQHDETYYMWALAFFMAFNRAASFRPGLVSETLSVRTFHFIEQNLTNYYEMMLTDRKEAASWARRMHLALKAYQELLATVNEMDISPDEAVRESSRIIKNNIFYVMEYRELFLALFRKFDERCQPRSFLRDLVETTHLFLKMLERFCRSRGNLVVQNKQKKRRKKKKKVLDQAIVSGNVPSSPEEVEAVWPALAEQLQCCAQNSELSMDSVVPFDAASEVPVEEQRAEAMVRIQDCLLAGQAPQALTLLRSAREVWPEGDVFGSQDISPEEEIQLLKQILSAPLPRQQGPEERGAEEEEEEEEEEEEELQVVQVSEKEFNFLDYLKRFACSTVVRAYVLLLRSYQQNSAHTNHCIVKMLHRLAHDLKMEALLFQLSVFCLFNRLLSDPAAGAYKELVTFAKYILGKFFALAAVNQKAFVELLFWKNTAVVREMTEGYGSLDDRSSSRRAPTWSPEEEAHLRELYLANKDVEGQDVVEAILAHLNTVPRTRKQIIHHLVQMGLADSVKDFQRKGTHIVLWTGDQELELQRLFEEFRDSDDVLGHIMKNITAKRSRARIVDKLLALGLVAERRELYKKRQKKLASSILPNGAESLKDFCQEDLEEEENLPEEDSEEEEEGGSEAEQVQGSLVLSNENLGQSLHQEGFSIPLLWLQNCLIRAADDREEDGCSQAVPLVPLTEENEEAMENEQFQQLLRKLGVRPPASGQETFWRIPAKLSPTQLRRAAASLSQPEEEQKLQPELQPKVPGEQGSDEEHCKEHRAQALRALLLAHKKKAGLASPEEEDAVGKEPLKAAPKKRQLLDSDEEQEEDEGRNRAPELGAPGIQKKKRYQIEDDEDD

SEQ ID NO: 721 - protein, 158 aa, Artificial Sequence [sequence omitted]

SEQ ID NO: 722 - protein, 197 aa, Artificial Sequence
  Synthetic
MQRASRLKRELHMLATEPPPGITCWQDKDQMDDLRAQILGGANTPYEKGVFKLEVIIPERYPFEPPQIRFLTPIYHPNIDSAGRICLDVLKLPPKGAWRPSLNIATVLTSIQLLMSEPNPDDPLMADISSEFKYNKPAFLKNARQWTEKHARQKQKADEEEMLDNLPEAGDSRVHNSTQKRKASQLVGIEKKFHPDV

SEQ ID NO: 723 - protein, 313 aa, Artificial Sequence; identical to SEQ ID NO: 48
  Synthetic

SEQ ID NO: 724 - protein, 1368 aa, Artificial Sequence [sequence omitted]

SEQ ID NO: 725 - protein, 1368 aa, Artificial Sequence
  Synthetic
MDKKYSIGLAIGTNSVGWAVITDEYKVPSKKFKVLGNTDRHSIKKNLIGALLFDSGETAEATRLKRTARRRYTRRKNRICYLQEIFSNEMAKVDDSFFHRLEESFLVEEDKKHERHPIFGNIVDEVAYHEKYPTIYHLRKKLVDSTDKADLRLIYLALAHMIKFRGHFLIEGDLNPDNSDVDKLFIQLVQTYNQLFEENPINASGVDAKAILSARLSKSRRLENLIAQLPGEKKNGLFGNLIALSLGLTPNFKSNFDLAEDAKLQLSKDTYDDDLDNLLAQIGDQYADLFLAAKNLSDAILLSDILRVNTEITKAPLSASMIKRYDEHHQDLTLLKALVRQQLPEKYKEIFFDQSKNGYAGYIDGGASQEEFYKFIKPILEKMDGTEELLVKLNREDLLRKQRTFDNGSIPHQIHLGELHAILRRQEDFYPFLKDNREKIEKILTFRIPYYVGPLARGNSRFAWMTRKSEETITPWNFEEVVDKGASAQSFIERMTAFDKNLPNEKVLPKHSLLYEYFTVYNELTKVKYVTEGMRKPAFLSGEQKKAIVDLLFKTNRKVTVKQLKEDYFKKIECFDSVEISGVEDRFNASLGTYHDLLKIIKDKDFLDNEENEDILEDIVLTLTLFEDREMIEERLKTYAHLFDDKVMKQLKRRRYTGWGALSRKLINGIRDKQSGKTILDFLKSDGFANRNFMALIHDDSLTFKEDIQKAQVSGQGDSLHEHIANLAGSPAIKKGILQTVKVVDELVKVMGRHKPENIVIEMARENQTTQKGQKNSRERMKRIEEGIKELGSQILKEHPVENTQLQNEKLYLYYLQNGRDMYVDQELDINRLSDYDVDHIVPQSFLKDDSIDNKVLTRSDKNRGKSDNVPSEEVVKKMKNYWRQLLNAKLITQRKFDNLTKAERGGLSELDKAGFIKRQLVETRAITKHVAQILDSRMNTKYDENDKLIREVKVITLKSKLVSDFRKDFQFYKVREINNYHHAHDAYLNAVVGTALIKKYPKLESEFVYGDYKVYDVRKMIAKSEQEIGKATAKYFFYSNIMNFFKTEITLANGEIRKRPLIETNGETGEIVWDKGRDFATVRKVLSMPQVNIVKKTEVQTGGFSKESILPKRNSDKLIARKKDWDPKKYGGFDSPTVAYSVLVVAKVEKGKSKKLKSVKELLGITIMERSSFEKNPIDFLEAKGYKEVKKDLIIKLPKYSLFELENGRKRMLASAGELQKGNELALPSKYVNFLYLASHYEKLKGSPEDNEQKQLFVEQHKHYLDEIIEQISEFSKRVILADANLDKVLSAYNKHRDKPIREQAENIIHLFTLTNLGAPAAFKYFDTTIDRKRYTSTKEVLDATLIHQSITGLYETRIDLSQLGGD

SEQ ID NO: 726 - protein, 1368 aa, Artificial Sequence
  Synthetic
MDKKYSIGLDIGTNSVGWAVITDEYKVPSKKFKVLGNTDRHSIKKNLIGALLFDSGETAEATRLKRTARRRYTRRKNRICYLQEIFSNEMAKVDDSFFHRLEESFLVEEDKKHERHPIFGNIVDEVAYHEKYPTIYHLRKKLVDSTDKADLRLIYLALAHMIKFRGHFLIEGDLNPDNSDVDKLFIQLVQTYNQLFEENPINASGVDAKAILSARLSKSRRLENLIAQLPGEKKNGLFGNLIALSLGLTPNFKSNFDLAEDAKLQLSKDTYDDDLDNLLAQIGDQYADLFLAAKNLSDAILLSDILRVNTEITKAPLSASMIKRYDEHHQDLTLLKALVRQQLPEKYKEIFFDQSKNGYAGYIDGGASQEEFYKFIKPILEKMDGTEELLVKLNREDLLRKQRTFDNGSIPHQIHLGELHAILRRQEDFYPFLKDNREKIEKILTFRIPYYVGPLARGNSRFAWMTRKSEETITPWNFEEVVDKGASAQSFIERMTNFDKNLPNEKVLPKHSLLYEYFTVYNELTKVKYVTEGMRKPAFLSGEQKKAIVDLLFKTNRKVTVKQLKEDYFKKIECFDSVEISGVEDRFNASLGTYHDLLKIIKDKDFLDNEENEDILEDIVLTLTLFEDREMIEERLKTYAHLFDDKVMKQLKRRRYTGWGRLSRKLINGIRDKQSGKTILDFLKSDGFANRNFMQLIHDDSLTFKEDIQKAQVSGQGDSLHEHIANLAGSPAIKKGILQTVKVVDELVKVMGRHKPENIVIEMARENQTTQKGQKNSRERMKRIEEGIKELGSQILKEHPVENTQLQNEKLYLYYLQNGRDMYVDQELDINRLSDYDVDHIVPQSFLADDSIDNKVLTRSDKNRGKSDNVPSEEVVKKMKNYWRQLLNAKLITQRKFDNLTKAERGGLSELDKAGFIKRQLVETRQITKHVAQILDSRMNTKYDENDKLIREVKVITLKSKLVSDFRKDFQFYKVREINNYHHAHDAYLNAVVGTALIKKYPALESEFVYGDYKVYDVRKMIAKSEQEIGKATAKYFFYSNIMNFFKTEITLANGEIRKAPLIETNGETGEIVWDKGRDFATVRKVLSMPQVNIVKKTEVQTGGFSKESILPKRNSDKLIARKKDWDPKKYGGFDSPTVAYSVLVVAKVEKGKSKKLKSVKELLGITIMERSSFEKNPIDFLEAKGYKEVKKDLIIKLPKYSLFELENGRKRMLASAGELQKGNELALPSKYVNFLYLASHYEKLKGSPEDNEQKQLFVEQHKHYLDEIIEQISEFSKRVILADANLDKVLSAYNKHRDKPIREQAENIIHLFTLTNLGAPAAFKYFDTTIDRKRYTSTKEVLDATLIHQSITGLYETRIDLSQLGGD

SEQ ID NO: 727 - protein, 1368 aa, Artificial Sequence
  Synthetic
MDKKYSIGLDIGTNSVGWAVITDEYKVPSKKFKVLGNTDRHSIKKNLIGALLFDSGETAEATRLKRTARRRYTRRKNRICYLQEIFSNEMAKVDDSFFHRLEESFLVEEDKKHERHPIFGNIVDEVAYHEKYPTIYHLRKKLVDSTDKADLRLIYLALAHMIKFRGHFLIEGDLNPDNSDVDKLFIQLVQTYNQLFEENPINASGVDAKAILSARLSKSRRLENLIAQLPGEKKNGLFGNLIALSLGLTPNFKSNFDLAEDAKLQLSKDTYDDDLDNLLAQIGDQYADLFLAAKNLSDAILLSDILRVNTEITKAPLSASMIKRYDEHHQDLTLLKALVRQQLPEKYKEIFFDQSKNGYAGYIDGGASQEEFYKFIKPILEKMDGTEELLVKLNREDLLRKQRTFDNGSIPHQIHLGELHAILRRQEDFYPFLKDNREKIEKILTFRIPYYVGPLARGNSRFAWMTRKSEETITPWNFEEVVDKGASAQSFIERMTNFDKNLPNEKVLPKHSLLYEYFTVYNELTKVKYVTEGMRKPAFLSGEQKKAIVDLLFKTNRKVTVKQLKEDYFKKIECFDSVEISGVEDRFNASLGTYHDLLKIIKDKDFLDNEENEDILEDIVLTLTLFEDREMIEERLKTYAHLFDDKVMKQLKRRRYTGWGRLSRKLINGIRDKQSGKTILDFLKSDGFANRAFAALIHDDSLTFKEDIQKAQVSGQGDSLHEHIANLAGSPAIKKGILQTVKVVDELVKVMGRHKPENIVIEMARENQTTQKGQKNSRERMKRIEEGIKELGSQILKEHPVENTQLQNEKLYLYYLQNGRDMYVDQELDINRLSDYDVDHIVPQSFLKDDSIDNKVLTRSDKNRGKSDNVPSEEVVKKMKNYWRQLLNAKLITQRKFDNLTKAERGGLSELDKAGFIKRQLVETRQITKHVAQILDSRMNTKYDENDKLIREVKVITLKSKLVSDFRKDFQFYKVREINNYHHAHDAYLNAVVGTALIKKYPKLESEFVYGDYKVYDVRKMIAKSEQEIGKATAKYFFYSNIMNFFKTEITLANGEIRKRPLIETNGETGEIVWDKGRDFATVRKVLSMPQVNIVKKTEVQTGGFSKESILPKRNSDKLIARKKDWDPKKYGGFESPTVAYSVLVVAKVEKGKSKKLKSVKELLGITIMERSSFEKNPIDFLEAKGYKEVKKDLIIKLPKYSLFELENGRKRMLASAGELQKGNELALPSKYVNFLYLASHYEKLKGSPEDNEQKQLFVEQHKHYLDEIIEQISEFSKRVILADANLDKVLSAYNKHRDKPIREQAENIIHLFTLTNLGAPAAFKYFDTTIDRKRYTSTKEVLDATLIHQSITGLYETRIDLSQLGGD

SEQ ID NO: 728 - protein, 1368 aa, Artificial Sequence; identical to SEQ ID NO: 727
  Synthetic

SEQ ID NO: 729 - protein, 1368 aa, Artificial Sequence
  Synthetic
MDKKYSIGLAIGTNSVGWAVITDEYKVPSKKFKVLGNTDRHSIKKNLIGALLFDSGETAEATRLKRTARRRYTRRKNRICYLQEIFSNEMAKVDDSFFHRLEESFLVEEDKKHERHPIFGNIVDEVAYHEKYPTIYHLRKKLVDSTDKADLRLIYLALAHMIKFRGHFLIEGDLNPDNSDVDKLFIQLVQTYNQLFEENPINASGVDAKAILSARLSKSRRLENLIAQLPGEKKNGLFGNLIALSLGLTPNFKSNFDLAEDAKLQLSKDTYDDDLDNLLAQIGDQYADLFLAAKNLSDAILLSDILRVNTEITKAPLSASMIKRYDEHHQDLTLLKALVRQQLPEKYKEIFFDQSKNGYAGYIDGGASQEEFYKFIKPILEKMDGTEELLVKLNREDLLRKQRTFDNGSIPHQIHLGELHAILRRQEDFYPFLKDNREKIEKILTFRIPYYVGPLARGNSRFAWMTRKSEETITPWNFEEVVDKGASAQSFIERMTAFDKNLPNEKVLPKHSLLYEYFTVYNELTKVKYVTEGMRKPAFLSGEQKKAIVDLLFKTNRKVTVKQLKEDYFKKIECFDSVEISGVEDRFNASLGTYHDLLKIIKDKDFLDNEENEDILEDIVLTLTLFEDREMIEERLKTYAHLFDDKVMKQLKRRRYTGWGALSRKLINGIRDKQSGKTILDFLKSDGFANRNFMALIHDDSLTFKEDIQKAQVSGQGDSLHEHIANLAGSPAIKKGILQTVKVVDELVKVMGRHKPENIVIEMARENQTTQKGQKNSRERMKRIEEGIKELGSQILKEHPVENTQLQNEKLYLYYLQNGRDMYVDQELDINRLSDYDVDHIVPQSFLADDSIDNKVLTRSDKNRGKSDNVPSEEVVKKMKNYWRQLLNAKLITQRKFDNLTKAERGGLSELDKAGFIKRQLVETRAITKHVAQILDSRMNTKYDENDKLIREVKVITLKSKLVSDFRKDFQFYKVREINNYHHAHDAYLNAVVGTALIKKYPALESEFVYGDYKVYDVRKMIAKSEQEIGKATAKYFFYSNIMNFFKTEITLANGEIRKAPLIETNGETGEIVWDKGRDFATVRKVLSMPQVNIVKKTEVQTGGFSKESILPKRNSDKLIARKKDWDPKKYGGFDSPTVAYSVLVVAKVEKGKSKKLKSVKELLGITIMERSSFEKNPIDFLEAKGYKEVKKDLIIKLPKYSLFELENGRKRMLASAGELQKGNELALPSKYVNFLYLASHYEKLKGSPEDNEQKQLFVEQHKHYLDEIIEQISEFSKRVILADANLDKVLSAYNKHRDKPIREQAENIIHLFTLTNLGAPAAFKYFDTTIDRKRYTSTKEVLDATLIHQSITGLYETRIDLSQLGGD

SEQ ID NO: 730 - protein, 1368 aa, Artificial Sequence
  Synthetic
MDKKYSIGLAIGTNSVGWAVITDEYKVPSKKFKVLGNTDRHSIKKNLIGALLFDSGETAEATRLKRTARRRYTRRKNRICYLQEIFSNEMAKVDDSFFHRLEESFLVEEDKKHERHPIFGNIVDEVAYHEKYPTIYHLRKKLVDSTDKADLRLIYLALAHMIKFRGHFLIEGDLNPDNSDVDKLFIQLVQTYNQLFEENPINASGVDAKAILSARLSKSRRLENLIAQLPGEKKNGLFGNLIALSLGLTPNFKSNFDLAEDAKLQLSKDTYDDDLDNLLAQIGDQYADLFLAAKNLSDAILLSDILRVNTEITKAPLSASMIKRYDEHHQDLTLLKALVRQQLPEKYKEIFFDQSKNGYAGYIDGGASQEEFYKFIKPILEKMDGTEELLVKLNREDLLRKQRTFDNGSIPHQIHLGELHAILRRQEDFYPFLKDNREKIEKILTFRIPYYVGPLARGNSRFAWMTRKSEETITPWNFEEVVDKGASAQSFIERMTNFDKNLPNEKVLPKHSLLYEYFTVYNELTKVKYVTEGMRKPAFLSGEQKKAIVDLLFKTNRKVTVKQLKEDYFKKIECFDSVEISGVEDRFNASLGTYHDLLKIIKDKDFLDNEENEDILEDIVLTLTLFEDREMIEERLKTYAHLFDDKVMKQLKRRRYTGWGRLSRKLINGIRDKQSGKTILDFLKSDGFANRAFAALIHDDSLTFKEDIQKAQVSGQGDSLHEHIANLAGSPAIKKGILQTVKVVDELVKVMGRHKPENIVIEMARENQTTQKGQKNSRERMKRIEEGIKELGSQILKEHPVENTQLQNEKLYLYYLQNGRDMYVDQELDINRLSDYDVDHIVPQSFLADDSIDNKVLTRSDKNRGKSDNVPSEEVVKKMKNYWRQLLNAKLITQRKFDNLTKAERGGLSELDKAGFIKRQLVETRQITKHVAQILDSRMNTKYDENDKLIREVKVITLKSKLVSDFRKDFQFYKVREINNYHHAHDAYLNAVVGTALIKKYPALESEFVYGDYKVYDVRKMIAKSEQEIGKATAKYFFYSNIMNFFKTEITLANGEIRKAPLIETNGETGEIVWDKGRDFATVRKVLSMPQVNIVKKTEVQTGGFSKESILPKRNSDKLIARKKDWDPKKYGGFESPTVAYSVLVVAKVEKGKSKKLKSVKELLGITIMERSSFEKNPIDFLEAKGYKEVKKDLIIKLPKYSLFELENGRKRMLASAGELQKGNELALPSKYVNFLYLASHYEKLKGSPEDNEQKQLFVEQHKHYLDEIIEQISEFSKRVILADANLDKVLSAYNKHRDKPIREQAENIIHLFTLTNLGAPAAFKYFDTTIDRKRYTSTKEVLDATLIHQSITGLYETRIDLSQLGGD

SEQ ID NO: 731 - protein, 1368 aa, Artificial Sequence
  Synthetic
MDKKYSIGLAIGTNSVGWAVITDEYKVPSKKFKVLGNTDRHSIKKNLIGALLFDSGETAEATRLKRTARRRYTRRKNRICYLQEIFSNEMAKVDDSFFHRLEESFLVEEDKKHERHPIFGNIVDEVAYHEKYPTIYHLRKKLVDSTDKADLRLIYLALAHMIKFRGHFLIEGDLNPDNSDVDKLFIQLVQTYNQLFEENPINASGVDAKAILSARLSKSRRLENLIAQLPGEKKNGLFGNLIALSLGLTPNFKSNFDLAEDAKLQLSKDTYDDDLDNLLAQIGDQYADLFLAAKNLSDAILLSDILRVNTEITKAPLSASMIKRYDEHHQDLTLLKALVRQQLPEKYKEIFFDQSKNGYAGYIDGGASQEEFYKFIKPILEKMDGTEELLVKLNREDLLRKQRTFDNGSIPHQIHLGELHAILRRQEDFYPFLKDNREKIEKILTFRIPYYVGPLARGNSRFAWMTRKSEETITPWNFEEVVDKGASAQSFIERMTAFDKNLPNEKVLPKHSLLYEYFTVYNELTKVKYVTEGMRKPAFLSGEQKKAIVDLLFKTNRKVTVKQLKEDYFKKIECFDSVEISGVEDRFNASLGTYHDLLKIIKDKDFLDNEENEDILEDIVLTLTLFEDREMIEERLKTYAHLFDDKVMKQLKRRRYTGWGRLSRKLINGIRDKQSGKTILDFLKSDGFANRAFAALIHDDSLTFKEDIQKAQVSGQGDSLHEHIANLAGSPAIKKGILQTVKVVDELVKVMGRHKPENIVIEMARENQTTQKGQKNSRERMKRIEEGIKELGSQILKEHPVENTQLQNEKLYLYYLQNGRDMYVDQELDINRLSDYDVDHIVPQSFLKDDSIDNKVLTRSDKNRGKSDNVPSEEVVKKMKNYWRQLLNAKLITQRKFDNLTKAERGGLSELDKAGFIKRQLVETRAITKHVAQILDSRMNTKYDENDKLIREVKVITLKSKLVSDFRKDFQFYKVREINNYHHAHDAYLNAVVGTALIKKYPKLESEFVYGDYKVYDVRKMIAKSEQEIGKATAKYFFYSNIMNFFKTEITLANGEIRKRPLIETNGETGEIVWDKGRDFATVRKVLSMPQVNIVKKTEVQTGGFSKESILPKRNSDKLIARKKDWDPKKYGGFESPTVAYSVLVVAKVEKGKSKKLKSVKELLGITIMERSSFEKNPIDFLEAKGYKEVKKDLIIKLPKYSLFELENGRKRMLASAGELQKGNELALPSKYVNFLYLASHYEKLKGSPEDNEQKQLFVEQHKHYLDEIIEQISEFSKRVILADANLDKVLSAYNKHRDKPIREQAENIIHLFTLTNLGAPAAFKYFDTTIDRKRYTSTKEVLDATLIHQSITGLYETRIDLSQLGGD

SEQ ID NO: 732 - protein, 1368 aa, Artificial Sequence
  Synthetic
MDKKYSIGLAIGTNSVGWAVITDEYKVPSKKFKVLGNTDRHSIKKNLIGALLFDSGETAEATRLKRTARRRYTRRKNRICYLQEIFSNEMAKVDDSFFHRLEESFLVEEDKKHERHPIFGNIVDEVAYHEKYPTIYHLRKKLVDSTDKADLRLIYLALAHMIKFRGHFLIEGDLNPDNSDVDKLFIQLVQTYNQLFEENPINASGVDAKAILSARLSKSRRLENLIAQLPGEKKNGLFGNLIALSLGLTPNFKSNFDLAEDAKLQLSKDTYDDDLDNLLAQIGDQYADLFLAAKNLSDAILLSDILRVNTEITKAPLSASMIKRYDEHHQDLTLLKALVRQQLPEKYKEIFFDQSKNGYAGYIDGGASQEEFYKFIKPILEKMDGTEELLVKLNREDLLRKQRTFDNGSIPHQIHLGELHAILRRQEDFYPFLKDNREKIEKILTFRIPYYVGPLARGNSRFAWMTRKSEETITPWNFEEVVDKGASAQSFIERMTAFDKNLPNEKVLPKHSLLYEYFTVYNELTKVKYVTEGMRKPAFLSGEQKKAIVDLLFKTNRKVTVKQLKEDYFKKIECFDSVEISGVEDRFNASLGTYHDLLKIIKDKDFLDNEENEDILEDIVLTLTLFEDREMIEERLKTYAHLFDDKVMKQLKRRRYTGWGRLSRKLINGIRDKQSGKTILDFLKSDGFANRAFAALIHDDSLTFKEDIQKAQVSGQGDSLHEHIANLAGSPAIKKGILQTVKVVDELVKVMGRHKPENIVIEMARENQTTQKGQKNSRERMKRIEEGIKELGSQILKEHPVENTQLQNEKLYLYYLQNGRDMYVDQELDINRLSDYDVDHIVPQSFLADDSIDNKVLTRSDKNRGKSDNVPSEEVVKKMKNYWRQLLNAKLITQRKFDNLTKAERGGLSELDKAGFIKRQLVETRAITKHVAQILDSRMNTKYDENDKLIREVKVITLKSKLVSDFRKDFQFYKVREINNYHHAHDAYLNAVVGTALIKKYPALESEFVYGDYKVYDVRKMIAKSEQEIGKATAKYFFYSNIMNFFKTEITLANGEIRKAPLIETNGETGEIVWDKGRDFATVRKVLSMPQVNIVKKTEVQTGGFSKESILPKRNSDKLIARKKDWDPKKYGGFESPTVAYSVLVVAKVEKGKSKKLKSVKELLGITIMERSSFEKNPIDFLEAKGYKEVKKDLIIKLPKYSLFELENGRKRMLASAGELQKGNELALPSKYVNFLYLASHYEKLKGSPEDNEQKQLFVEQHKHYLDEIIEQISEFSKRVILADANLDKVLSAYNKHRDKPIREQAENIIHLFTLTNLGAPAAFKYFDTTIDRKRYTSTKEVLDATLIHQSITGLYETRIDLSQLGGD

SEQ ID NO: 733 - protein, 1368 aa, Artificial Sequence
  Synthetic
MDKKYSIGLAIGTNSVGWAVITDEYKVPSKKFKVLGNTDRHSIKKNLIGALLFDSGETAEATRLKRTARRRYTRRKNRICYLQEIFSNEMAKVDDSFFHRLEESFLVEEDKKHERHPIFGNIVDEVAYHEKYPTIYHLRKKLVDSTDKADLRLIYLALAHMIKFRGHFLIEGDLNPDNSDVDKLFIQLVQTYNQLFEENPINASGVDAKAILSARLSKSRRLENLIAQLPGEKKNGLFGNLIALSLGLTPNFKSNFDLAEDAKLQLSKDTYDDDLDNLLAQIGDQYADLFLAAKNLSDAILLSDILRVNTEITKAPLSASMIKRYDEHHQDLTLLKALVRQQLPEKYKEIFFDQSKNGYAGYIDGGASQEEFYKFIKPILEKMDGTEELLVKLNREDLLRKQRTFDNGSIPHQIHLGELHAILRRQEDFYPFLKDNREKIEKILTFRIPYYVGPLARGNSRFAWMTRKSEETITPWNFEEVVDKGASAQSFIERMTNFDKNLPNEKVLPKHSLLYEYFTVYNELTKVKYVTEGMRKPASLSGEQKKAIVDLLFKTNRKVTVKQLKEDYFKKIECFDSVEISGVEDRFNASLGTYHDLLKIIKDKDFLDNEENEDILEDIVLTLTLFEDREMIEERLKTYAHLFDDKVMKQLKRRRYTGWGRLSRKLINGIRDKQSGKTILDFLKSDGFANRNFMQLIHDDSLTFKEDIQKAQVSGQGDSLHEHIANLAGSPAIKKGILQTVKVVDELVKVMGRHKPENIVIEIARENQTTQKGQKNSRERMKRIEEGIKELGSQILKEHPVENTQLQNEKLYLYYLQNGRDMYVDQELDINRLSDYDVDHIVPQSFLKDDSIDNKVLTRSDKNRGKSDNVPSEEVVKKMKNYWRQLLNANLITQRKFDNLTKAERGGLSELDKAGFIKRQLVETRQITKHVAQILDSRMNTKYDENDKLIREVKVITLKSKLVSDFRKDFQFYKVREINNYHHAHDAYLNAVVGTALIKKYPKLESEFVYGDYKVYDVRKMIAKSEQEIGKATAKYFFYSNIMNFFKTEITLANGEIRKRPLIETNGETGEIVWDKGRDFATVRKVLSMPQVNIVKKTEVQTGGFSKESILPKRNSDKLIARKKDWDPKKYGGFDSPTVAYSVLVVAKVEKGKSKKLKSVKELLGITIMERSSFEKNPIDFLEAKGYKEVKKDLIIKLPKYSLFELENGRKRMLASAGELQKGNELALPSKYVNFLYLASHYEKLKGSPEDNEQKQLFVEQHKHYLDEIIEQISEFSKRVILADANLDKVLSAYNKHRDKPIREQAENIIHLFTLTNLGAPAAFKYFDTTIDRKRYTSTKEVLDATLIHQSITGLYETRIDLSQLGGD

SEQ ID NO: 734 - protein, 1368 aa, Artificial Sequence
  Synthetic
MDKKYSIGLDIGTNSVGWAVITDEYKVPSKKFKVLGNTDRHSIKKNLIGALLFDSGETAEATRLKRTARRRYTRRKNRICYLQEIFSNEMAKVDDSFFHRLEESFLVEEDKKHERHPIFGNIVDEVAYHEKYPTIYHLRKKLVDSTDKADLRLIYLALAHMIKFRGHFLIEGDLNPDNSDVDKLFIQLVQTYNQLFEENPINASGVDAKAILSARLSKSRRLENLIAQLPGEKKNGLFGNLIALSLGLTPNFKSNFDLAEDAKLQLSKDTYDDDLDNLLAQIGDQYADLFLAAKNLSDAILLSDILRVNTEITKAPLSASMIKRYDEHHQDLTLLKALVRQQLPEKYKEIFFDQSKNGYAGYIDGGASQEEFYKFIKPILEKMDGTEELLVKLNREDLLRKQRTFDNGSIPHQIHLGELHAILRRQEDFYPFLKDNREKIEKILTFRIPYYVGPLARGNSRFAWMTRKSEETITPWNFEEVVDKGASAQSFIERMTNFDKNLPNEKVLPKHSLLYEYFTVYNELTKVKYVTEGMRKPAFLSGEQKKAIVDLLFKTNRKVTVKQLKEDYFKKIECFDSVEISGVEDRFNASLGTYHDLLKIIKDKDFLDNEENEDILEDIVLTLTLFEDREMIEERLKTYAHLFDDKVMKQLKRRRYTGWGRLSRKLINGIRDKQSGKTILDFLKSDGFANRNFMQLIHDDSLTFKEDIQKAQVSGQGDSLHEHIANLAGSPAIKKGILQTVKVVDELVKVMGRHKPENIVIEMARENQTTQKGQKNSRERMKRIEEGIKELGSQILKEHPVENTQLQNEKLYLYYLQNGRDMYVDQELDINRLSDYDVDHIVPQSFLKDDSIDNKVLTRSDKNRGKSDNVPSEEVVKKMKNYWRQLLNAKLITQRKFDNLTKAERGGLSELDKAGFIKRQLVETRQITKHVAQILDSRMNTKYDENDKLIREVKVITLKSKLVSDFRKDFQFYKVREINNYHHAHDAYLNAVVGTALIKKYPKLESEFVYGDYKVYDVRKMIAKSEQEIGKATAKYFFYSNIMNFFKTEITLANGEIRKRPLIETNGETGEIVWDKGRDFATVRKVLSMPQVNIVKKTEVQTGGFSKESIRPKRNSDKLIARKKDWDPKKYGGFVSPTVAYSVLVVAKVEKGKSKKLKSVKELLGITIMERSSFEKNPIDFLEAKGYKEVKKDLIIKLPKYSLFELENGRKRMLASARFLQKGNELALPSKYVNFLYLASHYEKLKGSPEDNEQKQLFVEQHKHYLDEIIEQISEFSKRVILADANLDKVLSAYNKHRDKPIREQAENIIHLFTLTNLGAPRAFKYFDTTIDRKVYRSTKEVLDATLIHQSITGLYETRIDLSQLGGD

SEQ ID NO: 735 - protein, 1368 aa, Artificial Sequence; identical to SEQ ID NO: 210
  Synthetic

SEQ ID NO: 736 - protein, 1368 aa, Artificial Sequence
  Synthetic
MDKKYSIGLAIGTNSVGWAVITDEYKVPSKKFKVLGNTDRHSIKKNLIGALLFDSGETAEATRLKRTARRRYTRRKNRICYLQEIFSNEMAKVDDSFFHRLEESFLVEEDKKHERHPIFGNIVDEVAYHEKYPTIYHLRKKLVDSTDKADLRLIYLALAHMIKFRGHFLIEGDLNPDNSDVDKLFIQLVQTYNQLFEENPINASGVDAKAILSARLSKSRRLENLIAQLPGEKKNGLFGNLIALSLGLTPNFKSNFDLAEDAKLQLSKDTYDDDLDNLLAQIGDQYADLFLAAKNLSDAILLSDILRVNTEITKAPLSASMIKRYDEHHQDLTLLKALVRQQLPEKYKEIFFDQSKNGYAGYIDGGASQEEFYKFIKPILEKMDGTEELLVKLNREDLLRKQRTFDNGSIPHQIHLGELHAILRRQEDFYPFLKDNREKIEKILTFRIPYYVGPLARGNSRFAWMTRKSEETITPWNFEEVVDKGASAQSFIERMTAFDKNLPNEKVLPKHSLLYEYFTVYNELTKVKYVTEGMRKPAFLSGEQKKAIVDLLFKTNRKVTVKQLKEDYFKKIECFDSVEISGVEDRFNASLGTYHDLLKIIKDKDFLDNEENEDILEDIVLTLTLFEDREMIEERLKTYAHLFDDKVMKQLKRRRYTGWGALSRKLINGIRDKQSGKTILDFLKSDGFANRNFMALIHDDSLTFKEDIQKAQVSGQGDSLHEHIANLAGSPAIKKGILQTVKVVDELVKVMGRHKPENIVIEMARENQTTQKGQKNSRERMKRIEEGIKELGSQILKEHPVENTQLQNEKLYLYYLQNGRDMYVDQELDINRLSDYDVDHIVPQSFLKDDSIDNKVLTRSDKNRGKSDNVPSEEVVKKMKNYWRQLLNAKLITQRKFDNLTKAERGGLSELDKAGFIKRQLVETRAITKHVAQILDSRMNTKYDENDKLIREVKVITLKSKLVSDFRKDFQFYKVREINNYHHAHDAYLNAVVGTALIKKYPKLESEFVYGDYKVYDVRKMIAKSEQEIGKATAKYFFYSNIMNFFKTEITLANGEIRKRPLIETNGETGEIVWDKGRDFATVRKVLSMPQVNIVKKTEVQTGGFSKESIRPKRNSDKLIARKKDWDPKKYGGFVSPTVAYSVLVVAKVEKGKSKKLKSVKELLGITIMERSSFEKNPIDFLEAKGYKEVKKDLIIKLPKYSLFELENGRKRMLASARFLQKGNELALPSKYVNFLYLASHYEKLKGSPEDNEQKQLFVEQHKHYLDEIIEQISEFSKRVILADANLDKVLSAYNKHRDKPIREQAENIIHLFTLTNLGAPRAFKYFDTTIDRKVYRSTKEVLDATLIHQSITGLYETRIDLSQLGGD

SEQ ID NO: 737 - protein, 335 aa, Artificial Sequence; identical to SEQ ID NO: 54
  Synthetic

SEQ ID NO: 738 - protein, 1107 aa, Artificial Sequence [sequence omitted]

SEQ ID NO: 739 - protein, 713 aa, Artificial Sequence; identical to SEQ ID NO: 56
  Synthetic

SEQ ID NO: 740 - protein, 740 aa, Artificial Sequence; identical to SEQ ID NO: 58
  Synthetic

SEQ ID NO: 741 - protein, 870 aa, Artificial Sequence; identical to SEQ ID NO: 59
  Synthetic

SEQ ID NO: 742 - protein, 1251 aa, Artificial Sequence; identical to SEQ ID NO: 64
  Synthetic

SEQ ID NO: 743 - protein, 914 aa, Artificial Sequence
  Synthetic
MGLSPLSTEPKTQKLSNKKGSNTDTLRRVLLTQAKNQFAAVNTPQKETSQIDGPSLNNTYGFKVSIQNLQEAKALHEIQNLTLISVELHARTRRDLEPDPEFDPICALFYCISSDTPLPDTEKTELTGVIVIDKDKTVFSQDIRYQTPLLIRSGITGLEVTYAADEKALFHEIANIIKRYDPDILLGYEIQMHSWGYLLQRAAALSIDLCRMISRVPDDKIENRFAAERDEYGSYTMSEINIVGRITLNLWRIMRNEVALTNYTFENVSFHVLHQRFPLFTFRVLSDWFDNKTDLYRWKMVDHYVSRVRGNLQMLEQLDLIGKTSEMARLFGIQFLHVLTRGSQYRVESMMLRIAKPMNYIPVTPSVQQRSQMRAPQCVPLIMEPESRFYSNSVLVLDFQSLYPSIVIAYNYCFSTCLGHVENLGKYDEFKFGCTSLRVPPDLLYQVRHDITVSPNGVAFVKPSVRKGVLPRMLEEILKTRFMVKQSMKAYKQDRALSRMLDARQLGLKLIANVTFGYTSANFSGRMPCIEVGDSIVHKARETLERAIKLVNDTKKWGARVVYGDTDSMFVLLKGATKEQSFKIGQEIAEAVTATNPKPVKLKFEKVYLPCVLQTKKRYVGYMYETLDQKDPVFDAKGIETVRRDSCPAVSKILERSLKLLFETRDISLIKQYVQRQCMKLLEGKASIQDFIFAKEYRGSFSYKPGACVPALELTRKMLTYDRRSEPQVGERVPYVIIYGTPGVPLIQLVRRPVEVLQDPTLRLNATYYITKQILPPLARIFSLIGIDVFSWYHELPRIHKATSSSRSEPEGRKGTISQYFTTLHCPVCDDLTQHGICSKCRSQPQHVAVILNQEIRELERQQEQLVKICKNCTGCFDRHIPCVSLNCPVLFKLSRVNRELSKAPYLRQLLDQF

SEQ ID NO: 744 - protein, 900 aa, Artificial Sequence; identical to SEQ ID NO: 63
  Synthetic

SEQ ID NO: 745 - protein, 575 aa, Artificial Sequence; identical to SEQ ID NO: 55
  Synthetic

SEQ ID NO: 746 - protein, 928 aa, Artificial Sequence [sequence omitted]
